(19) United States
(12) Patent Application Publication
(10) Pub. No.: US 2010/0035259 A1
(43) Pub. Date: Feb. 11, 2010

(54) BIOMARKERS AND METHODS FOR DETERMINING SENSITIVITY TO VASCULAR ENDOTHELIAL GROWTH FACTOR RECEPTOR-2 MODULATORS

(75) Inventors: Shujian Wu, Langhorne, PA (US); Mark David Ayers, Pennington, NJ (US); Xia Han, Pennington, NJ (US); Suganthy Yoganathan, Clinton, NJ (US); Joseph Fargnoli, Pipersville, PA (US)

Correspondence Address: LOUIS J. WILLE;BRISTOL-MYERS SQUIBB COMPANY, PATENT DEPARTMENT, P O BOX 4000, PRINCETON, NJ, 08543-4000, US

(73) Assignee: Bristol-Myers Squibb Company

(21) Appl. No.: 12/450,122

(22) PCT Filed: Mar. 12, 2008
(86) PCT No.: PCT/US2008/003258

§ 371 Date: Sep. 11, 2009

Related U.S. Application Data
(60) Provisional application No. 60/906,433, filed on Mar. 12, 2007.

(51) Int. Cl. C12Q 1/68

(52) U.S. Cl. 435/6

(57) ABSTRACT

VEGFR-2 biomarkers useful in a method for identifying and monitoring a mammal that will respond therapeutically to a method of treating cancer comprising administering an VEGFR-2 modulator, wherein the method comprises (a) exposing the mammal to the VEGFR-2 modulator and (b) measuring in the mammal the level of the at least one biomarker, wherein a difference in the level of the at least one biomarker measured in (b) compared to the level of the biomarker in a mammal that has not been exposed to the VEGFR-2 modulator indicates that the mammal will respond therapeutically to the method of treating cancer and (c) wherein the level of the biomarker in a mammal after exposure to a VEGFR-2 modulator indicates that the mammal has responded therapeutically to the method of treating cancer

### SEQUENCE LISTING

[0001] A compact disc labeled “Copy 1” contains the Sequence Listing as 10918 PCT.ST25.txt. The Sequence Listing is 1262 KB in size and was recorded Mar. 12, 2008. The compact disk is 1 of 2 compact disks. A duplicate copy of the compact disc is labeled “Copy 2” and is 2 of 2 compact discs.

[0002] The compact disc and duplicate copy are identical and are hereby incorporated by reference into the present application.

### FIELD OF THE INVENTION

[0003] The present invention relates generally to the field of pharmacogenomics, and more specifically, to methods and procedures used to monitor response or determine sensitivity in patients to allow the identification of individualized genetic profiles which will aid in treating diseases and disorders.

### BACKGROUND OF THE INVENTION

[0004] Cancer is a disease with extensive histoclinical heterogeneity. Although conventional histological and clinical features have been correlated to prognosis, the same apparent prognostic type of tumors varies widely in its responsiveness to therapy and consequent survival of the patient.

[0005] New prognostic and predictive markers, which would facilitate an individualization of therapy for each patient, are needed to accurately predict patient response to treatments, such as small molecule or biological molecule drugs, in the clinic. The problem may be solved by the identification of new parameters that could better predict the patient's sensitivity to treatment. The classification of patient samples is a crucial aspect of cancer diagnosis and treatment. The association of a patient's response to a treatment with molecular and genetic markers can open up new opportunities for treatment development in non-responding patients, or distinguish a treatment's indication among other treatment choices because of higher confidence in the efficacy. Further, the pre-selection of patients who are likely to respond well to a medicine, drug, or combination therapy may reduce the number of patients needed in a clinical study or accelerate the time needed to complete a clinical development program (M. Cockett et al., Current Opinion in Biotechnology, 11:602-609 (2000)).

[0006] The ability to determine which patients are responding to anti-angiogenesis therapies (such as VEGFR-2 modulators) or predict drug sensitivity in patients is particularly challenging because drug responses reflect not only properties intrinsic to the target cells, but also a host's metabolic properties. Efforts to use genetic information to predict or monitor drug response have primarily focused on individual genes that have broad effects, such as the multidrug resistance genes mdr1 and mrp1 (P. Sonneveld, J. Intern. Med., 247:521-534 (2000)).

[0007] The development of microarray technologies for large scale characterization of gene mRNA expression pattern has made it possible to systematically search for molecular markers and to categorize cancers into distinct subgroups not evident by traditional histopathological methods (J. Khan et al., Cancer Res., 58:5009-5013 (1998); A. A. Alizadeh et al., Nature, 403:503-511 (2000); M. Bittner et al., Nature, 406:536-540 (2000); J. Khan et al., Nature Medicine, 7(6):673-679 (2001); and T. R. Golub et al., Science, 286:531-537 (1999); U. Alon et al., P. N. A. S. USA, 96:6745-6750 (1999)). Such technologies and molecular tools have made it possible to monitor the expression level of a large number of transcripts within a cell population at any given time (see, e.g., Schena et al., Science, 270:467-470 (1995); Lockhart et al., Nature Biotechnology, 14:1675-1680 (1996); Blanchard et al., Nature Biotechnology, 14:1649 (1996); U.S. Pat. No. 5,569,588 to Ashby et al.).

[0008] Recent studies demonstrate that gene expression information generated by microarray analysis of human tumors can predict clinical outcome (L. J. van't Veer et al., Nature, 415:530-536 (2002); M. Shipp et al., Nature Medicine, 8(1):68-74 (2002); G. Glinsky et al., The Journal of Clin. Invest, 113(6):913-923 (2004)). These findings bring hope that cancer treatment will be vastly improved by better predicting and monitoring the response of individual tumors to therapy.

[0009] PCT Application No. PCT/US2006/034201 provides biomarkers useful for identifying a mammal that will respond therapeutically to a method of treating cancer comprising administering an VEGFR-2 modulator.

[0010] Needed are new and alternative methods and procedures to determine drug sensitivity or monitor response in patients to allow the development of individualized diagnostics which are necessary to treat diseases and disorders based on patient response at a molecular level.

### SUMMARY OF THE INVENTION

[0011] The invention provides methods and procedures for determining patient sensitivity or monitor response at the molecular level to one or more vascular endothelial growth factor receptor 2 (VEGFR-2) modulators. The invention also provides methods of determining or predicting whether an individual requiring therapy for a disease state such as cancer will or will not respond to treatment, prior to administration of the treatment, wherein the treatment comprises administration of one or more VEGFR-2 modulators. The one or more VEGFR-2 modulators are compounds that can be selected from, for example, one or more VEGFR-2 specific ligands, one or more small molecule VEGFR-2 inhibitors, or one or more VEGFR-2 binding monoclonal antibodies.

[0012] In one aspect, the invention provides a method for identifying a mammal that will respond therapeutically to a method of treating cancer comprising administering an VEGFR-2 modulator, wherein the method comprises: (a) measuring in the mammal the level of at least one biomarker selected from the biomarkers of Tables 2-4; (b) exposing a biological sample from the mammal to the VEGFR-2 modulator; (c) following the exposing in step (b), measuring in said biological sample the level of the at least one biomarker, wherein a difference in the level of the at least one biomarker measured in step (c) compared to the level of the at least one biomarker measured in step (a) indicates that the mammal will respond therapeutically to said method of treating cancer.

[0013] A difference in the level of the biomarker that is sufficient to indicate whether the mammal will or will not respond therapeutically to the method of treating cancer can be readily determined by one of skill in the art using known techniques. The increase or decrease in the level of the biomarker can be correlated to determine whether the difference is sufficient to identify a mammal that will respond therapeutically. The difference in the level of the biomarker that is sufficient can, in one aspect, be predetermined prior to determining whether the mammal will respond therapeutically to the treatment. In one aspect, the difference in the level of the biomarker is a difference in the mRNA level (measured, for example, by RT-PCR or a microarray), such as at least a two-fold difference, at least a three-fold difference, or at least a four-fold difference in the level of expression. In another aspect, the difference in the level of the biomarker is determined by IHC. In another aspect, the difference in the level of the biomarker refers to a p-value of <0.05 in Anova analysis. In yet another aspect, the difference is determined in an ELISA assay.

[0014] As used herein, respond therapeutically refers to the alleviation or abrogation of the cancer. This means that the life expectancy of an individual affected with the cancer will be increased or that one or more of the symptoms of the cancer will be reduced or ameliorated. The term encompasses a reduction in cancerous cell growth or tumor volume. Whether a mammal responds therapeutically can be measured by many methods well known in the art, such as PET imaging.

[0015] The mammal can be, for example, a human, rat, mouse, dog rabbit, pig sheep, cow, horse, cat, primate, or monkey.

[0016] The method of the invention can be, for example, an in vitro method wherein the step of measuring in the mammal the level of at least one biomarker comprises taking a biological sample from the mammal and then measuring the level of the biomarker(s) in the biological sample. The biological sample can comprise, for example, at least one of serum, whole fresh blood, peripheral blood mononuclear cells, frozen whole blood, fresh plasma, frozen plasma, urine, saliva, skin, hair follicle, bone marrow, or tumor tissue.

[0017] The level of the at least one biomarker can be, for example, the level of protein and/or mRNA transcript of the biomarker(s).

[0018] In another aspect, the invention provides a method for identifying a mammal that will respond therapeutically to a method of treating cancer comprising administering an VEGFR-2 modulator, wherein the method comprises: (a) exposing a biological sample from the mammal to the VEGFR-2 modulator; (b) following the exposing of step (a), measuring in said biological sample the level of at least one biomarker selected from the biomarkers of Tables 2-4, wherein a difference in the level of the at least one biomarker measured in step (b), compared to the level of the biomarker in a mammal that has not been exposed to said VEGFR-2 modulator, indicates that the mammal will respond therapeutically to said method of treating cancer.

[0019] In yet another aspect, the invention provides a method for testing or predicting whether a mammal will respond therapeutically to a method of treating cancer comprising administering an VEGFR-2 modulator, wherein the method comprises: (a) measuring in the mammal the level of at least one biomarker selected from the biomarkers of Tables 2-4; (b) exposing the mammal to the VEGFR-2 modulator; (c) following the exposing of step (b), measuring in the mammal the level of the at least one biomarker, wherein a difference in the level of the at least one biomarker measured in step (c) compared to the level of the at least one biomarker measured in step (a) indicates that the mammal will respond therapeutically to said method of treating cancer.

[0020] In another aspect, the invention provides a method for determining whether a compound inhibits VEGFR-2 activity in a mammal, comprising: (a) exposing the mammal to the compound; and (b) following the exposing of step (a), measuring in the mammal the level of at least one biomarker selected from the biomarkers of Tables 2-4, wherein a difference in the level of said biomarker measured in step (b), compared to the level of the biomarker in a mammal that has not been exposed to said compound, indicates that the compound inhibits VEGFR-2 activity in the mammal.

[0021] In yet another aspect, the invention provides a method for determining whether a mammal has been exposed to a compound that inhibits VEGFR-2 activity, comprising (a) exposing the mammal to the compound; and (b) following the exposing of step (a), measuring in the mammal the level of at least one biomarker selected from the biomarkers of Tables 2-4, wherein a difference in the level of said biomarker measured in step (b), compared to the level of the biomarker in a mammal that has not been exposed to said compound, indicates that the mammal has been exposed to a compound that inhibits VEGFR-2 activity.

[0022] In another aspect, the invention provides a method for determining whether a mammal is responding to a compound that inhibits VEGFR-2 activity, comprising (a) exposing the mammal to the compound; and (b) following the exposing of step (a), measuring in the mammal the level of at least one biomarker selected from the biomarkers of Tables 2-4, wherein a difference in the level of the at least one biomarker measured in step (b), compared to the level of the at least one biomarker in a mammal that has not been exposed to said compound, indicates that the mammal is responding to the compound that inhibits VEGFR-2 activity.

[0023] As used herein, “responding” encompasses responding by way of a biological and cellular response, as well as a clinical response (such as improved symptoms, a therapeutic effect, or an adverse event), in a mammal

[0024] The invention also provides an isolated biomarker selected from the biomarkers of Tables 2-4. The biomarkers of the invention comprise sequences selected from the nucleotide and amino acid sequences provided in Tables 2-4 and the Sequence Listing, as well as fragments and variants thereof.

[0025] The invention also provides a biomarker set comprising two or more biomarkers selected from the biomarkers of Tables 2-4.

[0026] The invention also provides kits for determining or predicting whether a patient would be susceptible or resistant to a treatment that comprises one or more VEGFR-2 modulators. The patient may have a cancer or tumor such as, for example, a colon cancer or tumor.

[0027] In one aspect, the kit comprises a suitable container that comprises one or more specialized microarrays of the invention, one or more VEGFR-2 modulators for use in testing cells from patient tissue specimens or patient samples, and instructions for use. The kit may further comprise reagents or materials for monitoring the expression of a biomarker set at the level of mRNA or protein.

[0028] In another aspect, the invention provides a kit comprising two or more biomarkers selected from the biomarkers of Tables 2-4.

[0029] In yet another aspect, the invention provides a kit comprising at least one of an antibody and a nucleic acid for detecting the presence of at least one of the biomarkers selected from the biomarkers of Tables 2-4. In one aspect, the kit further comprises instructions for determining whether or not a mammal will respond therapeutically to a method of treating cancer comprising administering a compound that inhibits VEGFR-2 activity. In another aspect, the instructions comprise the steps of (a) measuring in the mammal the level of at least one biomarker selected from the biomarkers of Tables 2-4, (b) exposing the mammal to the compound, (c) following the exposing of step (b), measuring in the mammal the level of the at least one biomarker, wherein a difference in the level of the at least one biomarker measured in step (c) compared to the level of the at least one biomarker measured in step (a) indicates that the mammal will respond therapeutically to said method of treating cancer.

[0030] The invention also provides screening assays for determining if a patient will be susceptible or resistant to treatment with one or more VEGFR-2 modulators.

[0031] The invention also provides a method of monitoring the treatment of a patient having a disease, wherein said disease is treated by a method comprising administering one or more VEGFR-2 modulators.

[0032] The invention also provides individualized genetic profiles which are necessary to treat diseases and disorders based on patient response at a molecular level.

[0033] The invention also provides specialized microarrays, e.g., oligonucleotide microarrays or cDNA microarrays, comprising one or more biomarkers having expression profiles that correlate with either sensitivity or resistance to one or more VEGFR-2 modulators.

[0034] The invention also provides antibodies, including polyclonal or monoclonal, directed against one or more biomarkers of the invention.

[0035] The invention will be better understood upon a reading of the detailed description of the invention when considered in connection with the accompanying figures.

### BRIEF DESCRIPTION OF THE FIGURES

[0036] FIG. 1 shows the expression values of ESM1 and MEST in stromal tissue upon either compound 1 or bevacizumab treatment at 17 Days.

[0037] FIG. 2 shows the expression values of S100A8 and S100A9 in stromal tissue upon either compound 1 or bevacizumab treatment at 17 Days.

[0038] FIG. 3 shows the expression value of EMP1 in tumor tissue upon either compound 1 or bevacizumab treatment at 17 Days.

[0039] FIG. 4 shows the expression values of VEGF, VEGFB, COL18A1, CEACAM1, and AKAP7 in tumor tissue upon either compound 1 or bevacizumab treatment at 17 Days.

### DETAILED DESCRIPTION OF THE INVENTION

[0040] Multiple preclinical studies have demonstrated the important role VEGF plays in driving the angiogenic process through its cognate receptors, the VEGFR family of transmembrane protein tyrosine kinases. The VEGFR-2 signaling pathway, in particular, has been experimentally supported to be a major driver of tumor angiogenesis. The VEGFR-2 signaling pathway is a clinically validated pathway in cancer therapy based on the approval of AVASTIN (bevacizumab), which indirectly inhibits this signaling pathway by preventing VEGF ligand binding. Compound 1, as defined below, has demonstrated potent inhibition of VEGFR-2 as well as inhibition of FGFR-1 and FGFR-2, another receptor family of protein tyrosine kinases underlying the angiogenic pathway and regulated by FGF growth factors. It is believed that by inhibiting multiple important angiogenesis pathways (VEGF and FGF), compound 1 has shown to have a increase affect on the ability to inhibit tumor growth when compared to bevacizumab in a GEO colon cancer model.

[0041] This biomarker study has lead to the identification of a set of biomarkers that reflect anti-angiogenesis and anti-tumor activities at the molecular level for which compound 1 has a greater affect relative to bevacizumab. The degree to which these biomarkers are affected is strongly associated with level of efficacy observed in this in vivo tumor model. These biomarkers could have important clinical implications in determining the optimal anti-angiogenesis therapy for cancer patients.

[0042] Identification of biomarkers that provide rapid and accessible readouts of efficacy, drug exposure, or clinical response is increasingly important in the clinical development of drug candidates. Embodiments of the invention include measuring changes in the levels of secreted proteins, or plasma biomarkers, which represent one category of biomarker. In one aspect, plasma samples, which represent a readily accessible source of material, serve as surrogate tissue for biomarker analysis.

[0043] The invention provides biomarkers that respond to the modulation of a specific signal transduction pathway and also correlate with VEGFR-2 modulator sensitivity or resistance. These biomarkers can be employed for predicting and monitoring response to one or more VEGFR-2 modulators. In one aspect, the biomarkers of the invention are those provided in Tables 2-4 and the Sequence Listing, including both polynucleotide and polypeptide sequences. In another aspect, the biomarkers of the invention are nucleotide sequences that, due to the degeneracy of the genetic code, encodes for a polypeptide sequence provided in the sequence listing.

[0044] The biomarkers serve as useful molecular tools for predicting and monitoring response to VEGFR-2 modulators that affect VEGFR-2 activity or the VEGFR-2 signal transduction pathway.

### VEGFR-2 Modulators:

[0045] As used herein, the term “VEGFR-2 modulator” is intended to mean a compound or drug that is a biological molecule or a small molecule that directly or indirectly modulates VEGFR-2 activity or the VEGFR-2 signal transduction pathway. Thus, compounds or drugs as used herein is intended to include both small molecules and biological molecules. Direct or indirect modulation includes activation or inhibition of VEGFR-2 activity or the VEGFR-2 signal transduction pathway. In one aspect, inhibition refers to inhibition of the binding of VEGFR-2 to an VEGFR-2 ligand such as, for example, VEGF. In another aspect, inhibition refers to inhibition of the kinase activity of VEGFR-2.

[0046] VEGFR-2 modulators include, for example, VEGFR-2 specific ligands, small molecule VEGFR-2 inhibitors, and VEGFR-2 monoclonal antibodies. In one aspect, the VEGFR-2 modulator inhibits VEGFR-2 activity and/or inhibits the VEGFR-2 signal transduction pathway. In another aspect, the VEGFR-2 modulator is an VEGFR-2 monoclonal antibody that inhibits VEGFR-2 activity and/or inhibits the VEGFR-2 signal transduction pathway.

[0047] VEGFR-2 modulators include biological molecules or small molecules.

[0048] Biological molecules include all lipids and polymers of monosaccharides, amino acids, and nucleotides having a molecular weight greater than 450. Thus, biological molecules include, for example, oligosaccharides and polysaccharides; oligopeptides, polypeptides, peptides, and proteins; and oligonucleotides and polynucleotides. Oligonucleotides and polynucleotides include, for example, DNA and RNA.

[0049] Biological molecules further include derivatives of any of the molecules described above. For example, derivatives of biological molecules include lipid and glycosylation derivatives of oligopeptides, polypeptides, peptides, and proteins.

[0050] Derivatives of biological molecules further include lipid derivatives of oligosaccharides and polysaccharides, e.g., lipopolysaccharides. Most typically, biological molecules are antibodies, or functional equivalents of antibodies. Functional equivalents of antibodies have binding characteristics comparable to those of antibodies, and inhibit the growth of cells that express VEGFR-2. Such functional equivalents include, for example, chimerized, humanized, and single chain antibodies as well as fragments thereof.

[0051] Functional equivalents of antibodies also include polypeptides with amino acid sequences substantially the same as the amino acid sequence of the variable or hypervariable regions of the antibodies. An amino acid sequence that is substantially the same as another sequence, but that differs from the other sequence by means of one or more substitutions, additions, and/or deletions, is considered to be an equivalent sequence. Preferably, less than 50%, more preferably less than 25%, and still more preferably less than 10%, of the number of amino acid residues in a sequence are substituted for, added to, or deleted from the protein.

[0052] The functional equivalent of an antibody is preferably a chimerized or humanized antibody. A chimerized antibody comprises the variable region of a non-human antibody and the constant region of a human antibody. A humanized antibody comprises the hypervariable region (CDRs) of a non-human antibody. The variable region other than the hypervariable region, e.g., the framework variable region, and the constant region of a humanized antibody are those of a human antibody.

[0053] Suitable variable and hypervariable regions of non-human antibodies may be derived from antibodies produced by any non-human mammal in which monoclonal antibodies are made. Suitable examples of mammals other than humans include, for example, rabbits, rats, mice, horses, goats, or primates.

[0054] Functional equivalents further include fragments of antibodies that have binding characteristics that are the same as, or are comparable to, those of the whole antibody. Suitable fragments of the antibody include any fragment that comprises a sufficient portion of the hypervariable (i.e., complementarity determining) region to bind specifically, and with sufficient affinity, to VEGFR-2 tyrosine kinase to inhibit growth of cells that express such receptors.

[0055] Such fragments may, for example, contain one or both Fab fragments or the F(ab′)2 fragment. Preferably, the antibody fragments contain all six complementarity determining regions of the whole antibody, although functional fragments containing fewer than all of such regions, such as three, four, or five CDRs, are also included.

[0056] In one aspect, the fragments are single chain antibodies, or Fv fragments. Single chain antibodies are polypeptides that comprise at least the variable region of the heavy chain of the antibody linked to the variable region of the light chain, with or without an interconnecting linker. Thus, Fv fragment comprises the entire antibody combining site. These chains may be produced in bacteria or in eukaryotic cells.

[0057] The antibodies and functional equivalents may be members of any class of immunoglobulins, such as IgG, IgM, IgA, IgD, or IgE, and the subclasses thereof.

[0058] In one aspect, the antibodies are members of the IgG1 subclass. The functional equivalents may also be equivalents of combinations of any of the above classes and subclasses.

[0059] In one aspect, the VEGFR-2 antibody is CDP-791 (UCB). In another aspect, the VEGFR-2 antibody is IMC-1121b (ImClone Systems). In yet another aspect, the VEGFR-2 modulator is AVE-005 (VEGF trap, Regeneron Pharmaceuticals).

[0060] In addition to the biological molecules discussed above, the VEGFR-2 modulators useful in the invention may also be small molecules. Any molecule that is not a biological molecule is considered herein to be a small molecule. Some examples of small molecules include organic compounds, organometallic compounds, salts of organic and organometallic compounds, saccharides, amino acids, and nucleotides. Small molecules further include molecules that would otherwise be considered biological molecules, except their molecular weight is not greater than 450. Thus, small molecules may be lipids, oligosaccharides, oligopeptides, and oligonucleotides and their derivatives, having a molecular weight of 450 or less.

[0061] It is emphasized that small molecules can have any molecular weight. They are merely called small molecules because they typically have molecular weights less than 450. Small molecules include compounds that are found in nature as well as synthetic compounds. In one embodiment, the VEGFR-2 modulator is a small molecule that inhibits the growth of tumor cells that express VEGFR-2. In another embodiment, the VEGFR-2 modulator is a small molecule that inhibits the growth of refractory tumor cells that express VEGFR-2.

[0062] Numerous small molecules have been described as being useful to inhibit VEGFR-2.

[0063] In one aspect, the VEGFR-2 modulator is [(1R), 2S]-2-Aminopropionic acid 2-[4-(4-fluoro-2-methyl-1H-indol-5-yloxy)-5-methylpyrrolo[2,1-f][1,2,4]triazin-6-yloxy]-1-methylethyl ester having the structure:

[chemical structure]

In another aspect, the VEGFR-2 modulator is selected from the compounds described in U.S. Pat. No. 6,869,952, hereby incorporated by reference. In yet another aspect, the VEGFR-2 modulator is selected from the compounds described in PCT Publication No. WO00/71129 or WO2004/009601, hereby incorporated by reference.

[0064] In another aspect, the VEGFR-2 modulator is selected from CHIR-258 (Chiron), AZD-2171 (AstraZeneca), GW786034 (GlaxoSmithKline), AMG 706 (Amgen), BIBF 1120 (Boehringer Ingelheim), AE788 (Novartis), ZD6474 (AstraZeneca), BAY 43-9006 (Sorafenib, Bayer), and SU11248 (Sutent, Pfizer).

### Biomarkers and Biomarker Sets:

[0065] The invention includes individual biomarkers and biomarker sets having both diagnostic and prognostic value in disease areas in which signaling through VEGFR-2 or the VEGFR-2 pathway is of importance, e.g., in cancers or tumors, in immunological disorders, conditions or dysfunctions, or in disease states in which cell signaling and/or cellular proliferation controls are abnormal or aberrant. The biomarker sets comprise a plurality of biomarkers such as, for example, a plurality of the biomarkers provided in Tables 2-4 that highly correlate with resistance or sensitivity to one or more VEGFR-2 modulators.

[0066] The biomarkers and biomarker sets of the invention enable one to predict or reasonably foretell the likely effect of one or more VEGFR-2 modulators in different biological systems or for cellular responses. The biomarkers and biomarker sets can be used in in vitro assays of VEGFR-2 modulator response by test cells to predict in vivo outcome. In accordance with the invention, the various biomarkers and biomarker sets described herein, or the combination of these biomarker sets with other biomarkers or markers, can be used, for example, to predict and monitor how patients with cancer might respond to therapeutic intervention with one or more VEGFR-2 modulators.

[0067] A biomarker and biomarker set of cellular gene expression patterns correlating with sensitivity or resistance of cells following exposure of the cells to one or more VEGFR-2 modulators provides a useful tool for screening one or more tumor samples before treatment with the VEGFR-2 modulator. The screening allows a prediction of cells of a tumor sample exposed to one or more VEGFR-2 modulators, based on the expression results of the biomarker and biomarker set, as to whether or not the tumor, and hence a patient harboring the tumor, will or will not respond to treatment with the VEGFR-2 modulator.

[0068] The biomarker or biomarker set can also be used as described herein for monitoring the progress of disease treatment or therapy in those patients undergoing treatment for a disease involving an VEGFR-2 modulator.

[0069] The biomarkers also serve as targets for the development of therapies for disease treatment. Such targets may be particularly applicable to treatment of cancer, such as, for example, hepatocellular carcinoma, colorectal cancer (CRC), NSCLC, and metastatic breast cancer.

[0070] Indeed, because these biomarkers are differentially expressed in sensitive and resistant cells, their expression patterns are correlated with relative intrinsic sensitivity of cells to treatment with VEGFR-2 modulators. Accordingly, the biomarkers highly expressed in resistant cells may serve as targets for the development of new therapies for the tumors which are resistant to VEGFR-2 modulators, particularly VEGFR-2 inhibitors. The level of biomarker protein and/or mRNA can be determined using methods well known to those skilled in the art. For example, quantification of protein can be carried out using methods such as ELISA, 2-dimensional SDS PAGE, Western blot, immunopreciptation, immunohistochemistry, fluorescence activated cell sorting (FACS), or flow cytometry. Quantification of mRNA can be carried out using methods such as PCR, array hybridization, Northern blot, in-situ hybridization, dot-blot, Taqman, or RNAse protection assay.

### Microarrays:

[0071] The invention also includes specialized microarrays, e.g., oligonucleotide microarrays or cDNA microarrays, comprising one or more biomarkers, showing expression profiles that correlate with either sensitivity or resistance to one or more VEGFR-2 modulators. Such microarrays can be employed in in vitro assays for assessing the expression level of the biomarkers in the test cells from tumor biopsies, and determining whether these test cells are likely to be resistant or sensitive to VEGFR-2 modulators. For example, a specialized microarray can be prepared using all the biomarkers, or subsets thereof, as described herein and shown in Tables 2-4. Cells from a tissue or organ biopsy can be isolated and exposed to one or more of the VEGFR-2 modulators. In one aspect, following application of nucleic acids isolated from both untreated and treated cells to one or more of the specialized microarrays, the pattern of gene expression of the tested cells can be determined and compared with that of the biomarker pattern from the control panel of cells used to create the biomarker set on the microarray. Based upon the gene expression pattern results from the cells that underwent testing, it can be determined if the cells show a resistant or a sensitive profile of gene expression. Whether or not the tested cells from a tissue or organ biopsy will respond to one or more of the VEGFR-2 modulators and the course of treatment or therapy can then be determined or evaluated based on the information gleaned from the results of the specialized microarray analysis.

### Antibodies:

[0072] The invention also includes antibodies, including polyclonal or monoclonal, directed against one or more of the polypeptide biomarkers. Such antibodies can be used in a variety of ways, for example, to purify, detect, and target the biomarkers of the invention, including both in vitro and in vivo diagnostic, detection, screening, and/or therapeutic methods.

### Kits:

[0073] The invention also includes kits for determining or predicting whether a patient would be susceptible or resistant to a treatment that comprises one or more VEGFR-2 modulators. The patient may have a cancer or tumor such as, for example, a breast cancer or tumor. Such kits would be useful in a clinical setting for use in testing a patient's biopsied tumor or cancer samples, for example, to determine or predict if the patient's tumor or cancer will be resistant or sensitive to a given treatment or therapy with an VEGFR-2 modulator. The kit comprises a suitable container that comprises: one or more microarrays, e.g., oligonucleotide microarrays or cDNA microarrays, that comprise those biomarkers that correlate with resistance and sensitivity to VEGFR-2 modulators, particularly VEGFR-2 inhibitors; one or more VEGFR-2 modulators for use in testing cells from patient tissue specimens or patient samples; and instructions for use. In addition, kits contemplated by the invention can further include, for example, reagents or materials for monitoring the expression of biomarkers of the invention at the level of mRNA or protein, using other techniques and systems practiced in the art such as, for example, RT-PCR assays, which employ primers designed on the basis of one or more of the biomarkers described herein, immunoassays, such as enzyme linked immunosorbent assays (ELISAs), immunoblotting, e.g., Western blots, or in situ hybridization, and the like, as further described herein.

### Application of Biomarkers and Biomarker Sets:

[0074] The biomarkers and biomarker sets may be used in different applications.

[0075] Biomarker sets can be built from any combination of biomarkers listed in Tables 2-4 to make predictions about the likely effect of any VEGFR-2 modulator in different biological systems. The various biomarkers and biomarkers sets described herein can be used, for example, as diagnostic or prognostic indicators in disease management, to predict how patients with cancer might respond to therapeutic intervention with compounds that modulate the VEGFR-2, and to predict how patients might respond to therapeutic intervention that modulates signaling through the entire VEGFR-2 regulatory pathway.

[0076] While the data described herein were generated in cell lines that are routinely used to screen and identify compounds that have potential utility for cancer therapy, the biomarkers have both diagnostic and prognostic value in other diseases areas in which signaling through VEGFR-2 or the VEGFR-2 pathway is of importance, e.g., in immunology, or in cancers or tumors in which cell signaling and/or proliferation controls have gone awry.

[0077] In accordance with the invention, cells from a patient tissue sample, e.g., a tumor or cancer biopsy, can be assayed to determine the expression pattern of one or more biomarkers prior to treatment with one or more VEGFR-2 modulators. Success or failure of a treatment can be determined based on the biomarker expression pattern of the cells from the test tissue (test cells), e.g., tumor or cancer biopsy, as being relatively similar or different from the expression pattern of a control set of the one or more biomarkers. Thus, if the test cells show a biomarker expression profile which corresponds to that of the biomarkers in the control panel of cells which are sensitive to the VEGFR-2 modulator, it is highly likely or predicted that the individual's cancer or tumor will respond favorably to treatment with the VEGFR-2 modulator. By contrast, if the test cells show a biomarker expression pattern corresponding to that of the biomarkers of the control panel of cells which are resistant to the VEGFR-2 modulator, it is highly likely or predicted that the individual's cancer or tumor will not respond to treatment with the VEGFR-2 modulator.

[0078] The invention also provides a method of monitoring the treatment of a patient having a disease treatable by one or more VEGFR-2 modulators. The isolated test cells from the patient's tissue sample, e.g., a tumor biopsy or blood sample, can be assayed to determine the expression pattern of one or more biomarkers before and after exposure to an VEGFR-2 modulator wherein, preferably, the VEGFR-2 modulator is an VEGFR-2 inhibitor. The resulting biomarker expression profile of the test cells before and after treatment is compared with that of one or more biomarkers as described and shown herein to be highly expressed in the control panel of cells that are either resistant or sensitive to an VEGFR-2 modulator. Thus, if a patient's response is sensitive to treatment by an VEGFR-2 modulator, based on correlation of the expression profile of the one or biomarkers, the patient's treatment prognosis can be qualified as favorable and treatment can continue. Also, if, after treatment with an VEGFR-2 modulator, the test cells don't show a change in the biomarker expression profile corresponding to the control panel of cells that are sensitive to the VEGFR-2 modulator, it can serve as an indicator that the current treatment should be modified, changed, or even discontinued. This monitoring process can indicate success or failure of a patient's treatment with an VEGFR-2 modulator and such monitoring processes can be repeated as necessary or desired.

[0079] The biomarkers of the invention can be used to predict an outcome prior to having any knowledge about a biological system. Essentially, a biomarker can be considered to be a statistical tool. Biomarkers are useful primarily in predicting the phenotype that is used to classify the biological system. In an embodiment of the invention, the goal of the prediction is to classify cancer cells as having an active or inactive VEGFR-2 pathway. Cancer cells with an inactive VEGFR-2 pathway can be considered resistant to treatment with an VEGFR-2 modulator.

### Examples

### Methods and Samples:

[0080] In the following examples, the compound [(1R), 2S]-2-Aminopropionic acid 2-[4-(4-fluoro-2-methyl-1H-indol-5-yloxy)-5-methylpyrrolo[2,1-f][1,2,4]triazin-6-yloxy]-1-methylethyl ester was used:

[chemical structure]

This compound is referred to herein as “compound 1.”

### Example 1

### Identification of Biomarkers

### Methods

[0081] Tumors were propagated in nude mice as subcutaneous (sc) implants using human GEO colon tumor cell lines. Tumors were maintained in nude mice by serial passage. Treated animals were checked daily for treatment related toxicity/mortality. Each group of animals was weighed before the initiation of treatment (Wt1) and then again following the last treatment dose (Wt2). The difference in body weight (Wt2-Wt1) provided an overt measure of treatment-related toxicity. No weight loss was observed in treated groups when compared to vehicle treated mice. Tumor response was determined by measurement of tumors with a caliper twice a week, until the tumors reached a predetermined target size. Animals that were distributed to various treatment and control groups during the study were eventually sacrificed to obtain tumor and blood samples for genomic and protein analysis (Table 1).

TABLE 1
Xenograft Groups and Treatments

| Group | |
|---|---|
| (6 mice per | |
| group) | Treatment |
| 1 | no treatment |
| 2 | bevacizumab (6 mg/kg) post 1 dose (2 hours) |
| 3 | compound 1 (100 mg/kg) post 1 dose (2 hours) |
| 4 | bevacizumab (6 mg/kg) q4 d × 5 (2 hours post last dose, |
| | day 17) |
| 5 | compound 1 (100 mg/kg) q1 d × 17 (2 hours post dose, |
| | day 17) |

Mouse GEO xenograft tumors, treated and non-treated, were surgically removed at appropriate time points and split into two halves. One half of the tumor was mixed in a vial of 10% formalin to be used for IHC and the other half was mixed in 1.0 ml of RNAlater™ RNA Stabilization Reagent (Ambion, Inc., Austin, Tex.) held at room temperature for 30-minutes then stored at −80° C. Total RNA was extracted from the tumor samples using the RNeasy Kit™ (Qiagen, Valencia Calif.). A least 1 μg total RNA with a 260/280 ratio >1.8 by spectrophotometry (DU640 UV, Beckman Coulter, Fullerton, Calif.) was required for transcriptional profiling. Briefly, the tumor samples were homogenized in a lysis-binding solution supplied by Qiagen. An equal volume of ethanol was mixed into each sample, the mixture was passed through the filter cartridges provided, and the rest of the extraction protocol was followed (Ambion). RNA yield and quality were assessed on a standard 1% agarose gel. A ratio 28 s/18 s RNA in the range of 1.5 to 2.5 indicated high quality RNA free of degradation. RNA samples were stored at −80° C.

[0082] Transcriptional profiling was performed on the RNA obtained from the GEO xenograft tumor samples. The Affymetrix GeneChip system (Affymetrix, Santa Clara, Calif.) was used for hybridization and scanning of the human U133A and mouse 430A arrays. Generation of cRNA followed a standard T7 amplification protocol. Total RNA was reverse-transcribed with SuperScript II™ (Gibco, Carlsbad, Calif.) in the presence of T7-(dT)24 primer to generate first strand cDNA. A second-strand cDNA synthesis was performed in the presence of DNA Polymerase I, DNA ligase, and RNase H (Gibco). The resulting double-stranded cDNA was blunt-ended using T4 DNA polymerase. This double-stranded cDNA was then transcribed into cRNA in the presence of biotin-ribonucleotides using the BioArray High Yield RNA transcript labeling kit (Enzo Life Sciences, Farmingdale, N.Y.). The amplified, biotin-labeled cRNA was purified using Qiagen RNeasy™ columns (Qiagen Sciences), quantified and fragmented at 94° C. for 35 minutes in the presence of fragmentation buffer (1×). Fragmented cRNA was hybridized to the Affymetrix U113A and 430A arrays overnight at 42° C. The arrays were then placed in the fluidics stations for staining and washing as recommended by Affymetrix protocols. The chips were scanned and raw intensity values were generated for each probe on the arrays.

### Statistical Analysis

[0083] 20 HG-U133A2 chips were normalized by the RMA (Robust Multi-array Analysis) method as described by R. A. Irizarry et al., Nucleic Acids Res., February 15; 31(4):e15 (2003). The same normalization was done for the 20 Mouse430A2 chips.

### Identification of Differentially Expressed Genes

[0084] Identification of differentially expressed genes upon compound treatment was performed using Bioconductor limma package (Linear Models for Microarray Data), which has improved statistical power for experiments with small numbers of arrays. Differentially expressed genes were defined as: (i) FDR (false discovery rate) q value less than 0.05 when comparing specific compound treatment at single time point to the control (no treatment) at 0 time point and (ii) fold change bigger than 2 (log₂Foldchange>1 or <−1) when compared specific treatment to control.

Identification of Biomarkers that Specifically Affect Mouse Stromal Tissues

[0085] Identification of biomarkers that specifically affect mouse stroma tissues was focused on because these would give a general picture of how compound 1 or bevacizumab affects vasculature surrounding the tumor tissues. There were 113 probe sets representing 110 genes identified on Mouse430A2 chips as differentially expressed genes (FDR q value<0.05) upon compound 1 treatment at 17 Days. This list was reduced by selecting those with a fold change larger than 2 when compared to the control, resulting in 41 probe sets (39 genes). The 41 probe sets were mapped to HG-U133A2 chips whenever possible, and 20 genes whose expression changes on human chips were not significant (FDR q value>0.2) were selected.

[0086] ESM1 (endothelial cell-specific molecule 1, also called endoncan), FST (follistatin), APH1A (anterior pharynx defective 1a homolog (C. elegans)) and INHBB (inhibin beta-B) are considered most interested ones and their expression patterns were plotted using R package. FIG. 1 shows the expression value of ESM1 in stromal tissue upon either compound 1 or bevacizumab treatment at 17 Days significantly decreases in comparison with the control. Importantly, even after 2 hours treatment, there is a decreasing trend in the ESM1 level by both agents. This result indicates that the expression of ESM1 at the mRNA level may respond to anti-angiogenic agents quickly and its level continues to decrease during the treatment. FIG. 1 also demonstrates that the impact of compound 1 on the ESM1 level is even more profound than that of bevacizumab at 17 days.

[0087] Table 2A provides the expression changes of significant genes in mouse stromal tissues. In Table 2A, genes are sorted by their fold change by compound 1 (com. 1) treatment: (i) category 1 (cat.): genes also changed significantly by bevacizumab (bev.) 17 days treatment; (ii) category 2: the extent of changed induced by bevacizumab and compound 1 treatment are significantly different; and (iii) category 3: the rest of genes (only changed by compound 1 treatment as defined above).

TABLE 2A
Genes that Specifically Affect Mouse Stromal Tissues Upon Compound 1
Treatment

| | | | | | difference | | |
|---|---|---|---|---|---|---|---|
| | | | | | between | difference | |
| | bev. | | com. 1 | | bev. and | between | |
| | log2 | | log2 | | com. 1 | bev. and | |
| | fold | bev. p | fold | com. 1 p | log2 fold | com. 1 p | |
| probe set ID | change | value | change | value | change | value | cat. |
| 1417851_at | 1.6837 | 0.9978 | 4.1105 | 0.0142 | 2.4268 | 0.1207 | 3 |
| 1419394_s_at | 1.9920 | 0.1651 | 3.2556 | 0.0049 | 1.2636 | 0.1941 | 3 |
| 1448756_at | 1.1326 | 0.9998 | 2.7363 | 0.0332 | 1.6037 | 0.1702 | 3 |
| 1417268_at | 0.2523 | 0.9998 | 2.5486 | 0.0021 | 2.2963 | 0.0050 | 2 |
| 1419149_at | 1.0236 | 0.3743 | 2.2328 | 0.0018 | 1.2092 | 0.0583 | 3 |
| 1428942_at | 0.6383 | 0.9998 | 2.1496 | 0.0185 | 1.5112 | 0.0804 | 3 |
| 1418457_at | 0.6694 | 0.9998 | 1.9297 | 0.0125 | 1.2603 | 0.0705 | 3 |
| 1416321_s_at | 0.6363 | 0.9998 | 1.6903 | 0.0471 | 1.0541 | 0.1710 | 3 |
| 1419665_a_at | 0.9402 | 0.5052 | 1.6533 | 0.0142 | 0.7131 | 0.2404 | 3 |
| 1427035_at | 0.6541 | 0.9998 | 1.5856 | 0.0221 | 0.9315 | 0.1444 | 3 |
| 1438211_s_at | 1.4915 | 0.0564 | 1.5264 | 0.0237 | 0.0349 | 0.9694 | 3 |
| 1419666_x_at | 0.8130 | 0.7015 | 1.4389 | 0.0283 | 0.6259 | 0.2922 | 3 |
| 1424302_at | 0.1770 | 0.9998 | 1.3842 | 0.0228 | 1.2072 | 0.0474 | 2 |
| 1425281_a_at | 0.9656 | 0.4785 | 1.3781 | 0.0428 | 0.4125 | 0.5152 | 3 |
| 1418456_a_at | 0.8855 | 0.4886 | 1.3591 | 0.0287 | 0.4737 | 0.4047 | 3 |
| 1419309_at | 0.1928 | 0.9998 | 1.3533 | 0.0192 | 1.1605 | 0.0452 | 2 |
| 1416125_at | 0.6576 | 0.7240 | 1.3503 | 0.0142 | 0.6927 | 0.1625 | 3 |
| 1426587_a_at | 0.6892 | 0.5271 | 1.3177 | 0.0126 | 0.6285 | 0.1660 | 3 |
| 1421034_a_at | 0.1847 | 0.9998 | 1.1326 | 0.0469 | 0.9479 | 0.0792 | 3 |
| 1421365_at | 0.1199 | 0.9998 | 1.0640 | 0.0333 | 0.9441 | 0.0543 | 3 |
| 1427844_a_at | 0.0299 | 0.9998 | 1.0382 | 0.0055 | 1.0083 | 0.0054 | 2 |
| 1438390_s_at | −0.2020 | 0.9998 | −1.0916 | 0.0256 | −0.8896 | 0.0623 | 3 |
| 1448688_at | −0.8705 | 0.3666 | −1.0948 | 0.0496 | −0.2243 | 0.6841 | 3 |
| 1448942_at | −1.0217 | 0.0174 | −1.1040 | 0.0073 | −0.0823 | 0.8478 | 1 |
| 1449147_at | −0.5207 | 0.9998 | −1.1088 | 0.0334 | −0.5882 | 0.2160 | 3 |
| 1449146_at | −0.8723 | 0.3660 | −1.1402 | 0.0412 | −0.2680 | 0.6154 | 3 |
| 1416211_a_at | −1.1978 | 0.0201 | −1.1586 | 0.0142 | 0.0393 | 0.9464 | 1 |
| 1451554_a_at | −0.1767 | 0.9998 | −1.1862 | 0.0006 | −1.0095 | 0.0038 | 2 |
| 1418181_at | −0.9981 | 0.1230 | −1.2198 | 0.0185 | −0.2217 | 0.6609 | 3 |
| 1417985_at | −0.3710 | 0.9998 | −1.2624 | 0.0073 | −0.8914 | 0.0447 | 2 |
| 1423516_a_at | −1.2432 | 0.0803 | −1.3889 | 0.0186 | −0.1457 | 0.8180 | 3 |
| 1459903_at | −0.8237 | 0.1138 | −1.4034 | 0.0018 | −0.5797 | 0.1341 | 3 |
| 1418142_at | −1.3672 | 0.1138 | −1.4093 | 0.0426 | −0.0421 | 0.9612 | 3 |
| 1428853_at | −0.9378 | 0.6726 | −1.5119 | 0.0465 | −0.5740 | 0.4008 | 3 |
| 1418499_a_at | −1.5445 | 0.0501 | −1.5662 | 0.0228 | −0.0217 | 0.9816 | 3 |
| 1451038_at | −0.7384 | 0.6529 | −1.6394 | 0.0081 | −0.9009 | 0.1044 | 3 |
| 1426858_at | −1.4395 | 0.1087 | −2.0687 | 0.0073 | −0.6292 | 0.3305 | 3 |
| 1420941_at | −2.3703 | 0.0488 | −2.1078 | 0.0454 | 0.2625 | 0.8144 | 1 |
| 1419589_at | −1.8871 | 0.0970 | −2.3397 | 0.0142 | −0.4527 | 0.6110 | 3 |
| 1423294_at | −2.2949 | 0.0070 | −2.9419 | 0.0006 | −0.6470 | 0.3568 | 1 |
| 1449280_at | −2.7929 | 0.0036 | −3.3695 | 0.0006 | −0.5766 | 0.4854 | 1 |

TABLE 2

| | NCBI Gene | | | DNA | | Protein | |
|---|---|---|---|---|---|---|---|
| | (LocusLink) | Gene | Probe | SEQ ID | DNA | SEQ ID | Protein |
| Entry | Title | Symbol | Set ID | NO: | Accession | NO: | Accession |
| 1 | N/A; | N/A; | 1417851_at | 1; 3; 4 | AF030636.1; | 2; 5 | AAC34603.1; |
| | chemokine | Cxcl13 | | | ENSMUST00000023840.3; | | NP_061354.1 |
| | (C—X—C motif) | | | | NM_018866.2 | | |
| | ligand 13 | | | | | | |
| 2 | S100 calcium | S100a8 | 1419394_s_at | 6 | NM_013650.2 | 7 | NP_038678.1 |
| | binding | | | | | | |
| | protein A8 | | | | | | |
| | (calgranulin | | | | | | |
| | A) | | | | | | |
| 3 | S100 calcium | S100a9 | 1448756_at | 8 | NM_009114.1 | 9 | NP_033140.1 |
| | binding | | | | | | |
| | protein A9 | | | | | | |
| | (calgranulin | | | | | | |
| | B) | | | | | | |
| 4 | CD14 antigen | Cd14 | 1417268_at | 10 | NM_009841.3 | 11 | NP_033971.1 |
| 5 | serine (or | Serpine 1 | 1419149_at | 12 | NM_008871.1 | 13 | NP_032897.1 |
| | cysteine) | | | | | | |
| | peptidase | | | | | | |
| | inhibitor, | | | | | | |
| | clade E, | | | | | | |
| | member 1 | | | | | | |
| 6 | Metallothionein 2 | Mt2 | 1428942_at | 14 | NM_008630.2 | 15 | NP_032656.1 |
| 7 | Chemokine | Cxcl14 | 1418457_at | 16 | NM_019568.2 | 17 | NP_062514.2 |
| | (C—X—C motif) | | | | | | |
| | ligand 14 | | | | | | |
| 8 | proline | Prelp | 1416321_s_at | 18 | NM_054077.2 | 19 | NP_473418.2 |
| | arginine-rich | | | | | | |
| | end leucine- | | | | | | |
| | rich repeat | | | | | | |
| 9 | Nuclear | Nupr1 | 1419665_a_at | 20 | NM_019738.1 | 21 | NP_062712.1 |
| | protein 1 | | | | | | |
| 10 | solute carrier | Slc39a | 1427035_at | 22; 24; | AK122197.1; | 23; 27 | BAC65479.2; |
| | family 39 | | | 25; 26 | BB399837.2; | | NP_659057.2 |
| | (zinc | | | | BC030883.1; | | |
| | transporter), | | | | NM_144808.4 | | |
| | member 14 | | | | | | |
| 11 | N/A; D site | N/A; | 1438211_s_at | 28; 30; | AK140243.1; | 29; 33 | BAE24294.1; |
| | albumin | Dbp | | 31; 32 | BB550183.1; | | NP_058670.1 |
| | promoter | | | | BC064094.1; | | |
| | binding | | | | NM_016974.1 | | |
| | protein | | | | | | |
| 12 | Nuclear | Nupr1 | 1419666_x_at | 20 | NM_019738.1 | 21 | NP_062712.1 |
| | protein 1 | | | | | | |
| 13 | hypothetical | N/A; | 1424302_at | 34; 36; | NM_011095.1; | 35; 37 | NP_035225.1; |
| | LOC619608; | Lilrb3 | | 38 | XM_974271.1; | | XP_979365.1 |
| | Leukocyte | | | | XR_002514.1 | | |
| | immunoglobulin- | | | | | | |
| | like | | | | | | |
| | receptor, | | | | | | |
| | subfamily B | | | | | | |
| | (With TM and | | | | | | |
| | ITIM | | | | | | |
| | domains), | | | | | | |
| | member 3 | | | | | | |
| 14 | TSC22 domain | Tsc22d3 | 1425281_a_at | 39 | NM_010286.3 | 40 | NP_034416.3 |
| | family 3 | | | | | | |
| 15 | Chemokine | Cxcl14 | 1418456_a_at | 16 | NM_019568.2 | 17 | NP_062514.2 |
| | (C—X—C motif) | | | | | | |
| | ligand 14 | | | | | | |
| 16 | PODOPLANIN | Pdpn | 1419309_at | 41 | NM_010329.2 | 42 | NP_034459.2 |
| 17 | FK506 | Fkbp5 | 1416125_at | 43 | NM_010220.2 | 44 | NP_034350.1 |
| | binding | | | | | | |
| | protein 5 | | | | | | |
| 18 | Signal | Stat3 | 1426587_a_at | 45; 47; | NM_011486.4; | 46; 48; | NP_035616.1; |
| | transducer and | | | 49 | NM_213659.2; | 50 | NP_998824.1; |
| | activator of | | | | NM_213660.2 | | NP_998825.1 |
| | transcription 3 | | | | | | |
| 19 | Interleukin 4 | Il4ra | 1421034_a_at | 51 | NM_001008700.3 | 52 | NP_001008700.1 |
| | receptor, alpha | | | | | | |
| 20 | Follistatin | Fst | 1421365_at | 53 | NM_008046.2 | 54 | NP_032072.1 |
| 21 | CCAAT/enhancer | Cebpb | 1427844_a_at | 55 | NM_009883.1 | 56 | NP_034013.1 |
| | binding | | | | | | |
| | protein | | | | | | |
| | (C/EBP), beta | | | | | | |
| 22 | Pituitary | Pttg1 | 1438390_s_at | 57 | NM_013917.1 | 58 | NP_038945.1 |
| | tumor- | | | | | | |
| | transforming 1 | | | | | | |
| 23 | Podocalyxin- | Podxl | 1448688_at | 59 | NM_013723.2 | 60 | NP_038751.2 |
| | like | | | | | | |
| 24 | Guanine | Gng11 | 1448942_at | 61 | NM_025331.2 | 62 | NP_079607.1 |
| | nucleotide | | | | | | |
| | binding | | | | | | |
| | protein (G | | | | | | |
| | protein), | | | | | | |
| | gamma 11 | | | | | | |
| 25 | carbohydrate | Chst1 | 1449147_at | 63 | NM_023850.1 | 64 | NP_076339.1 |
| | (keratan | | | | | | |
| | sulfate Gal-6) | | | | | | |
| | sulfotransferase 1 | | | | | | |
| 26 | Notch gene | Notch4 | 1449146_at | 65 | NM_010929.2 | 66 | NP_035059.2 |
| | homolog 4 | | | | | | |
| | (Drosophila) | | | | | | |
| 27 | Pleiotrophin | Ptn | 1416211_a_at | 67 | NM_008973.2 | 68 | NP_032999.1 |
| 28 | N/A; anterior | N/A; | 1451554_a_at | 69; 71; | BC012406.1; | 70; 73 | AAH12406.1; |
| | pharynx | Aph1a | | 72 | ENSMUST00000015894.4; | | NP_666216.1 |
| | defective 1a | | | | NM_146104.1 | | |
| | homolog (C. elegans) | | | | | | |
| | 94.4; | | | | | | |
| 29 | protein | pPtp4a3 | 1418181_at | 74 | NM_008975.2 | 75 | NP_033001.2 |
| | tyrosine | | | | | | |
| | phosphatase | | | | | | |
| | 4a3 | | | | | | |
| 30 | Notch- | Nrarp | 1417985_at | 76 | NM_025980.2 | 77 | NP_080256.2 |
| | regulated | | | | | | |
| | ankyrin repeat | | | | | | |
| | protein | | | | | | |
| 31 | Nidogen 2 | Nid2 | 1423516_a_at | 78 | NM_008695.2 | 79 | NP_032721.2 |
| 32 | sema domain, | Sema7a | 1459903_at | 80 | NM_011352.2 | 81 | NP_035482.1 |
| | immunoglobulin | | | | | | |
| | domain (Ig), | | | | | | |
| | and GPI | | | | | | |
| | membrane | | | | | | |
| | anchor, | | | | | | |
| | (semaphorin) | | | | | | |
| | 7A | | | | | | |
| 33 | Potassium | Kcnj8 | 1418142_at | 82 | NM_008428.2 | 83 | NP_032454.1 |
| | inwardly- | | | | | | |
| | rectifying | | | | | | |
| | channel, | | | | | | |
| | subfamily J, | | | | | | |
| | member 8 | | | | | | |
| 34 | N/A; Patched | N/A; | 1428853_at | 84; 85 | BG071079.2; | | |
| | homolog 1 | Ptch1 | | | AK147626.1 | | |
| | {POOR HIT | (63%) | | | | | |
| | 63%} | | | | | | |
| 35 | potassium | Kcne3 | 1418499_a_at | 86 | NM_020574.3 | 87 | NP_065599.1 |
| | voltage-gated | | | | | | |
| | channel, Isk- | | | | | | |
| | related | | | | | | |
| | subfamily, | | | | | | |
| | gene 3 | | | | | | |
| 36 | APELIN | Apln | 1451038_at | 88 | NM_013912.3 | 89 | NP_038940.1 |
| 37 | inhibin beta-B | Inhbb | 1426858_at | 90; 92 | NM_008381.1; | 91; 93 | NP_032407.1; |
| | | | | | XM_984243.1 | | XP_989337.1 |
| 38 | Regulator of | Rgs5 | 1420941_at | 94 | NM_009063.2 | 95 | NP_033089.2 |
| | G-protein | | | | | | |
| | signaling 5 | | | | | | |
| 39 | CD93 antigen | Cd93 | 1419589_at | 96 | NM_010740.2 | 97 | NP_034870.1 |
| 40 | Mesoderm | Mest | 1423294_at | 98 | NM_008590.1 | 99 | NP_032616.1 |
| | specific | | | | | | |
| | transcript | | | | | | |
| 41 | similar to | N/A; | 1449280_at | 100; | NM_023612.3; | 101; 103 | NP_076101.1; |
| | Endothelial | Esm1 | | 102 | XM_906879.2 | | XP_911972.1 |
| | cell-specific | | | | | | |
| | molecule 1 | | | | | | |
| | precursor | | | | | | |
| | (ESM-1 | | | | | | |
| | secretory | | | | | | |
| | protein) | | | | | | |
| | (ESM-1); | | | | | | |
| | endothelial | | | | | | |
| | cell-specific | | | | | | |
| | molecule 1 | | | | | | |

### Biological Function of the Significant Genes

### ESM1 (Endothelial Cell-Specific Molecule 1)

[0088] ESM1 is a soluble proteoglycan of 50 kDa, constituted of a mature polypeptide of 165 amino acids, which is expressed by the vascular endothelium and has been found freely circulating in the bloodstream of healthy subjects. Experimental evidence shows ESM1 is a key player in the regulation of major processes such as cell adhesion, in inflammatory disorders and tumor progression. Inflammatory cytokines such as TNF-alpha, and pro-angiogenic growth factors such as VEGF, FGF-2 and HGF/SF, strongly increased the expression, synthesis or the secretion of endocan by human endothelial cells. In tumor patients, the ESM1 level is elevated in serum as measured by enzyme-linked immunoassay. Recently, the mRNA level of ESM1 has also been recognized as being one of the most significant molecular signatures of a bad prognosis in several types of cancer including lung cancer. ESM1 has been suggested as a biomarker in monitoring anti-angiogenesis in cancer therapy. (S. Sarrazin et al., Biochim Biophys Acta., 1765:25-37 (2006); A. Scherpereel, et al., Cancer Research, 63:6084-6089 (2003))

### MEST: Mesoderm Specific Transcript (Also Known as PEG1, Paternally Expressed Gene 1. FIG. 1)

[0089] Human mesoderm-specific transcript (MEST) is an imprinted gene expressed from the paternal allele and located on chromosome 7q32. In a recent study, MEST was found to be highly differentially expressed (up 8 fold) in invasive cervical carcinoma (CVX) compared to normal cervical keratinocytes (NCK). Frequent loss of imprinting (LOI) of PEG1/MEST has been implicated in the development of breast carcinoma, lung adenocarcinomas and colon cancer. Although the function of MEST gene product is unknown, the putative protein shares homology with the α/β hydrolase family, which also includes the lysosomal enxyme cathepsin A. This may suggest a possible role of MEST in the degradation of the extracellular matrix in the invasive state of cervical tumors. (A. Santin et al., Virology, January 20; 331 (2):269-91 (2005)).

### S100A8/S100A9 (MRP8/MRP14. FIG. 2)

[0090] S100A8 and S100A9 are members of the S100 family of Ca2+-binding proteins and S100A8/A9 is the most abundant naturally occurring S100 heterodimer. S100A8 and S100A9 are considered important pro-inflammatory mediators in acute and chronic inflammation. They are expressed by keratinocytes and inflammatory cells in human/murine wounds and by appropriately activated macrophages, endothelial cells, epithelial cells, and keratinocytes in vitro. Strong S100A8 and S100A9 up-regulation was found in breast, lung, gastric, colorectal, pancreatic and prostate cancer. They are involved in various biological functions including cytoskeletal rearrangements, cell migration, arachidonic acid metabolism, and regulation of neutrophilic NADPH-oxidase. S100A8/A9 acts as a secreted protein complex and is the ligand for RAGE (receptor of advanced glycation end products). Co-expression of S100 proteins with RAGE (also known as AGER: advanced glycosylation end product-specific receptor) has been found in different types of tumor tissues. There are multiple RAGE downstream pathways including MAP kinases, PI3K, Ras and NF-κB. (C. Gebhardt et al., Biochem Pharmacol., November 30; 72(11):1622-31 (2006)).

[0091] The S100A8/S100A9 complex is released specifically at inflammatory sites and leads to increased serum levels in correlation with the degree of inflammation, indicating an extracellular role of these molecules in inflammatory processes. There are multiple findings indicating interactions between S100A8/S100A9 complex and endothelial cells. The protein complex is deposited on endothelia and bind specifically to human microvascular endothelial cells (HMECs). This complex also binds to carboxylated N-glycans expressed on inflammatory activated endothelial cells. The S100A8/S100A9 complex can increase the binding capacity of CD11b-CD18 on leukocytes to intracellular adhesion molecule-1 (ICAM-1) on endothelium. The S100A8/S100A9 complex directly induces a distinct inflammatory, thrombogenic response in HMECs and is characterized by the induction of proinflammatory chemokines and adhesion molecules and by increased vascular permeability. (D. Viemann et al., Blood, April 1; 105(7):2955-62. 2005))

[0092] In the current study, expression levels of S100A8 and S100A9 were both up-regulated in mouse stroma tissue upon compound 1 treatment at 17 days time point. Interestingly, the expression level of RAGE was also up-regulated in human xenograft tissue under the same treatment conditions (up 1.9 fold, FDR q=0.002). A reasonable hypothesis would be treatment of compound 1 promotes an acute inflammatory response in the mouse stroma tissue surrounding xenografts, as indicated by the elevated levels of S100A8 and S100A9. An acute inflammatory response against tumor xenografts is also supported by elevated CD14 (a surface molecule for monocytic cells) expression upon compound 1 treatment. Elevated ligand expression promotes RAGE expression levels in xenografts and subsequently activates signal pathways downstream RAGE, which normally promote tumor formation.

[0093] S100A8 mRNA expression in murine fibroblasts can also be induced by FGF-2 (F. Rahimi et al., FEBS J., June; 272(11):2811-27 (2005)). Even though FGF-2 levels didn't change much in the current experiment due to low expression, FGF-8, FGF-18, FGF-22 and FGFR-2 levels were all elevated in tumor xenografts under compound 1 treatment after 17 days.

Identification of Genes that Specifically Affect Tumor Tissues by both Compound 1 and Bevacizumab

[0094] Table 3A provides genes differentially expressed (FDR q value<0.05; Fold change>2) on HG-U133A2 chips upon treatment of compound 1 or bevacizumab. Genes are sorted by their fold change by compound 1 treatment. Two genes in category 1 (CDC27 and CSPG6) also have significant differences when comparing the extent of changes by bevacizumab and compound 1 treatment.

TABLE 3A
Genes That Specifically Affect Tumor Tissues by Both Compound 1 and
Bevacizumab

| | | | | | difference | | |
|---|---|---|---|---|---|---|---|
| | bev. | | com. 1 | | between | difference | |
| | log2 | | log2 | | bev. com. 1 | between | |
| | fold | bev. p | fold | com. 1 | log2 fold | bev. com. 1 | |
| probe set ID | change | value | change | p value | change | p value | cat. |
| 211074_at | 2.1465 | 0.0039 | 2.2582 | 0.0007 | 0.1118 | 0.8556 | 2 |
| 201324_at | 1.3329 | 0.0328 | 1.9803 | 0.0006 | 0.6474 | 0.1423 | 2 |
| 201061_s_at | 1.0760 | 0.0230 | 1.4890 | 0.0007 | 0.4131 | 0.2196 | 2 |
| 205483_s_at | 1.2276 | 0.0173 | 1.4417 | 0.0011 | 0.2141 | 0.5876 | 2 |
| 207847_s_at | 1.4949 | 0.0118 | 1.3284 | 0.0041 | −0.1666 | 0.7245 | 2 |
| 209921_at | 1.0484 | 0.0251 | 1.2819 | 0.0012 | 0.2336 | 0.5012 | 2 |
| 207158_at | 0.8843 | 0.0369 | 1.2325 | 0.0009 | 0.3481 | 0.2452 | 2 |
| 208436_s_at | 1.1961 | 0.0030 | 1.2092 | 0.0007 | 0.0130 | 0.9719 | 2 |
| 208966_x_at | 1.4436 | 0.0117 | 1.1920 | 0.0063 | −0.2516 | 0.5631 | 2 |
| 202074_s_at | 1.0289 | 0.0093 | 1.1915 | 0.0008 | 0.1626 | 0.5901 | 2 |
| 213693_s_at | 1.2759 | 0.0044 | 1.1479 | 0.0019 | −0.1280 | 0.7193 | 2 |
| 204981_at | 0.9087 | 0.0029 | 1.1407 | 0.0003 | 0.2320 | 0.2777 | 2 |
| 201482_at | 1.1017 | 0.0386 | 1.1383 | 0.0052 | 0.0366 | 0.9385 | 2 |
| 207574_s_at | 0.8582 | 0.0042 | 1.0736 | 0.0004 | 0.2154 | 0.3184 | 2 |
| 206332_s_at | 1.4322 | 0.0244 | 1.0437 | 0.0227 | −0.3885 | 0.4018 | 2 |
| 200696_s_at | 1.0650 | 0.0065 | 1.0382 | 0.0016 | −0.0268 | 0.9391 | 2 |
| 209835_x_at | 1.2007 | 0.0347 | 1.0335 | 0.0131 | −0.1672 | 0.7089 | 2 |
| 221705_s_at | −1.4467 | 0.0014 | −1.0156 | 0.0033 | 0.4311 | 0.1652 | 2 |
| 213971_s_at | −1.0343 | 0.0040 | −1.0206 | 0.0010 | 0.0137 | 0.9668 | 2 |
| 201996_s_at | −0.9345 | 0.0019 | −1.0522 | 0.0004 | −0.1177 | 0.5993 | 2 |
| 212079_s_at | −0.6658 | 0.0388 | −1.0837 | 0.0005 | −0.4179 | 0.0699 | 2 |
| 220232_at | −1.0538 | 0.0206 | −1.0910 | 0.0028 | −0.0372 | 0.9264 | 2 |
| 212926_at | −1.1631 | 0.0031 | −1.0912 | 0.0011 | 0.0719 | 0.8197 | 2 |
| 212030_at | −0.7839 | 0.0276 | −1.1182 | 0.0007 | −0.3343 | 0.1830 | 2 |
| 201927_s_at | −1.3798 | 0.0001 | −1.1245 | 0.0005 | 0.2553 | 0.2778 | 2 |
| 217878_s_at | −2.4757 | 0.0000 | −1.1781 | 0.0008 | 1.2976 | 0.0010 | 1 |
| 209258_s_at | −2.2926 | 0.0001 | −1.1992 | 0.0044 | 1.0934 | 0.0105 | 1 |
| 214537_at | −1.5073 | 0.0023 | −1.2426 | 0.0019 | 0.2647 | 0.4601 | 2 |
| 220295_x_at | −0.8566 | 0.0333 | −1.3621 | 0.0005 | −0.5055 | 0.0784 | 2 |

TABLE 3

| | | | | DNA | | | |
|---|---|---|---|---|---|---|---|
| | NCBI Gene | | | SEQ | | Protein | |
| | (LocusLink) | Gene | Probe | ID | DNA | SEQ | Protein |
| Entry | Title | Symbol | Set ID | NO: | Accession | ID NO: | Accession |
| 1 | folate | FOLR1 | 211074_at | 104 | AF000381.2 | 105 | AAB81938.2 |
| | receptor 1 | (27%) | | | | | |
| | (adult) | | | | | | |
| | {POOR HIT | | | | | | |
| | 27%} | | | | | | |
| 2 | Epithelial | EMP1 | 201324_at | 106 | NM_001423.1 | 107 | NP_001414.1 |
| | membrane | | | | | | |
| | protein 1 | | | | | | |
| 3 | Stomatin | STOM | 201061_s_at | 108; | NM_004099.4; | 109; | NP_004090.4; |
| | | | | 110 | NM_198194.1 | 111 | NP_937837.1 |
| 4 | ISG15 | ISG15 | 205483_s_at | 112 | NM_005101.1 | 113 | NP_005092.1 |
| | ubiquitin-like | | | | | | |
| | modifier | | | | | | |
| 5 | Mucin 1, cell | MUC1 | 207847_s_at | 114; | NM_001018016.1; | 115; | NP_001018016.1; |
| | surface | | | 116; | NM_001018017.1; | 117; | NP_001018017.1; |
| | associated | | | 118 | NM_002456.4 | 119 | NP_002447.4 |
| 6 | solute carrier | SLC7A11 | 209921_at | 120; | AB040875.1; | 121; | BAB40574.1; |
| | family 7, | | | 122 | NM_014331.3 | 123 | NP_055146.1 |
| | (cationic | | | | | | |
| | amino acid | | | | | | |
| | transporter, | | | | | | |
| | y+ system) | | | | | | |
| | member 11 | | | | | | |
| 7 | apolipoprotein | APOBEC1 | 207158_at | 124 | NM_001644.3 | 125 | NP_001635.2 |
| | B mRNA | | | | | | |
| | editing | | | | | | |
| | enzyme, | | | | | | |
| | catalytic | | | | | | |
| | polypeptide 1 | | | | | | |
| 8 | Interferon | IRF7 | 208436_s_at | 126; | NM_001572.3; | 127; | NP_001563.2; |
| | regulatory | | | 128; | NM_004029.2; | 129; | NP_004020.1; |
| | factor 7 | | | 130 | NM_004031.2 | 131 | NP_004022.2 |
| 9 | Interferon, | IFI16 | 208966_x_at | 132 | AF208043.1 | 133 | AAF20997.1 |
| | gamma- | (58%) | | | | | |
| | inducible | | | | | | |
| | protein 16 | | | | | | |
| | {POOR HIT | | | | | | |
| | 58%} | | | | | | |
| 10 | Optineurin | OPTN | 202074_s_at | 134; | NM_001008211.1; | 135; | NP_001008212.1; |
| | | | | 136; | NM_001008212.1; | 137; | NP_001008213.1; |
| | | | | 138; | NM_001008213.1; | 139; | NP_001008214.1; |
| | | | | 140 | NM_021980.4 | 141 | NP_068815.2 |
| 11 | Mucin 1, cell | MUC1 | 213693_s_at | 114; | NM_001018016.1; | 115; | NP_001018016.1; |
| | surface | | | 116; | NM_001018017.1; | 117; | NP_001018017.1; |
| | associated | | | 118 | NM_002456.4 | 119 | NP_002447.4 |
| 12 | solute carrier | SLC22A18 | 204981_at | 142 | NM_002555.3 | 143 | NP_002546.2 |
| | family 22 | | | | | | |
| | (organic | | | | | | |
| | cation | | | | | | |
| | transporter), | | | | | | |
| | member 18 | | | | | | |
| 13 | Quiescin Q6 | QSCN6 | 201482_at | 144; | NM_001004128.2; | 145; | NP_001004128.1; |
| | | | | 146 | NM_002826.4 | 147 | NP_002817.2 |
| 14 | Growth arrest | GADD45B | 207574_s_at | 148 | NM_015675.2 | 149 | NP_056490.2 |
| | and DNA- | | | | | | |
| | damage- | | | | | | |
| | inducible, | | | | | | |
| | beta | | | | | | |
| 15 | Interferon, | IFI16 | 206332_s_at | 150 | NM_005531.2 | 151 | NP_005522.2 |
| | gamma- | | | | | | |
| | inducible | | | | | | |
| | protein 16 | | | | | | |
| 16 | gelsolin | GSN | 200696_s_at | 152; | NM_000177.4; | 153; | NP_000168.1; |
| | (amyloidosis, | | | 154 | NM_198252.2 | 155 | NP_937895.1 |
| | Finnish type) | | | | | | |
| 17 | CD44 | CD44 | 209835_x_at | 156; | NM_000610.3; | 157; | NP_000601.3; |
| | molecule | | | 158; | NM_001001389.1; | 159; | NP_001001389.1; |
| | (Indian blood | | | 160 | NM_001001390.1 | 161 | NP_001001390.1 |
| | group) | | | | | | |
| 18 | Suppressor of | SIKE | 221705_s_at | 162 | NM_025073.1 | 163 | NP_079349.1 |
| | IKK epsilon | (*) | | | | | |
| 19 | suppressor of | SUZ12 | 213971_s_at | 164 | NM_015355.1 | 165 | NP_056170.1 |
| | zeste 12 | | | | | | |
| | homolog | | | | | | |
| | (Drosophila) | | | | | | |
| 20 | spen | SPEN | 201996_s_at | 166 | NM_015001.2 | 167 | NP_055816.2 |
| | homolog, | | | | | | |
| | transcriptional | | | | | | |
| | regulator | | | | | | |
| | (Drosophila) | | | | | | |
| 21 | myeloid/lymphoid | MLL | 212079_s_at | 168 | NM_005933.2 | 169 | NP_005924.2 |
| | or | | | | | | |
| | mixed- | | | | | | |
| | lineage | | | | | | |
| | leukemia | | | | | | |
| | (trithorax | | | | | | |
| | homolog, | | | | | | |
| | Drosophila) | | | | | | |
| 22 | stearoyl-CoA | SCD5 | 220232_at | 170 | NM_024906.1 | 171 | NP_079182.1 |
| | desaturase 5 | | | | | | |
| 23 | Structural | SMC5 | 212926_at | 172 | NM_015110.1 | 173 | NP_055925.1 |
| | maintenance | | | | | | |
| | of | | | | | | |
| | chromosomes 5 | | | | | | |
| 24 | RNA binding | RBM25 | 212030_at | 174 | NM_021239.1 | 175 | NP_067062.1 |
| | motif protein | | | | | | |
| | 25 | | | | | | |
| 25 | Plakophilin 4 | PKP4 | 201927_s_at | 176; | NM_001005476.1; | 177; | NP_001005476.1; |
| | | | | 178 | NM_003628.3 | 179 | NP_003619.2 |
| 26 | cell division | CDC27 | 217878_s_at | 180 | NM_001256.2 | 181 | NP_001247.2 |
| | cycle 27 | | | | | | |
| | homolog (S. cerevisiae) | | | | | | |
| 27 | Structural | SMC3 | 209258_s_at | 182 | NM_005445.3 | 183 | NP_005436.1 |
| | maintenance | | | | | | |
| | of | | | | | | |
| | chromosomes 3 | | | | | | |
| 28 | histone | HIST1H1D | 214537_at | 184 | NM_005320.2 | 185 | NP_005311.1 |
| | cluster 1, H1d | | | | | | |
| 29 | DEP domain | DEPDC1 | 220295_x_at | 186 | NM_017779.3 | 187 | NP_060249.2 |
| | containing 1 | | | | | | |

### Biological Functions of Significant Genes

### EMP1 (Epithelial Membrane Protein 1. Also Known as TMP: Tumor Membrane Protein)

[0095] It is noted that EMP-1 expression is 6 fold down-regulated in esophageal cancer compared to normal tissue. It is highly up-regulated during squamous cell differentiation and has a role in tumorigenesis in certain tumors. Overexpression of human EMP-1 gene can inhibit the proliferation of certain tumor cells with S phase arrested and G1 phase prolonged (H. Wang et al., World J Gastroenterol., March; 9(3):392-8 (2003)). In our experiment, EMP1 was up-regulated 2.5 fold by bevacizumab and 3.9 fold by compound 1, both with significant FDR q values. This indicates a potential anti-proliferation effect by both compounds (FIG. 3).

[0096] EMP1 has been identified as a clinical biomarker whose expression was correlated with lack of complee or partial response to gefitinib in lung cancer patient samples as well as clinical progression to secondary gefitinib resistance. Its expression was also correlated with acquisition of gefitinib resistance in a mouse xenograft model. Such correlations are independent of gefitinib-sensitizing EGFR somatic mutations (A. Jain et al., P.N.A.S. USA., August 16; 102(33):11858-63 (2005)).

Identification of Genes that Specifically Affect Tumor Tissues Only by Compound 1

[0097] Table 4A provides the top 40 genes that are differentially expressed on HG-U133A2 chips (FDR<0.05, fold change>2) specifically upon compound 1 treatment at 17 Days. These markers were not changed by bevacizumab treatment at 17 Days (FDR>0.2). Genes are sorted by their fold change by compound 1 treatment. Three genes (DAPK1, HIG2, AKAP7) changed in opposite directions by bevacizumab and compound 1 treatment.

TABLE 4A
Genes that Specifically Affect Tumor Tissues only by Compound 1

| | bev. 17 | | com. 1 | | difference | | |
|---|---|---|---|---|---|---|---|
| | days | | 17 days | | bev. com. 1 | difference | |
| | log2 | bev. 17 | log2 | com. 1 | 17 days | bev. com. 1 | |
| | fold | days p | fold | 17 days | log2 fold | 17 days p | |
| probe set ID | change | value | change | p value | change | value | cat. |
| 213350_at | 0.1890 | 0.9504 | 2.3542 | 0.0134 | 2.1652 | 0.0247 | 2 |
| 212190_at | 0.2629 | 0.7959 | 2.1748 | 0.0003 | 1.9119 | 0.0010 | 2 |
| 206576_s_at | 0.2751 | 0.8710 | 2.1443 | 0.0024 | 1.8692 | 0.0076 | 2 |
| 212044_s_at | 0.5848 | 0.6680 | 2.1271 | 0.0027 | 1.5424 | 0.0200 | 2 |
| 204259_at | 1.0356 | 0.2352 | 1.9635 | 0.0019 | 0.9280 | 0.0895 | 2 |
| 211889_x_at | 0.1466 | 0.9250 | 1.8274 | 0.0017 | 1.6807 | 0.0045 | 2 |
| 216246_at | 0.4582 | 0.7420 | 1.7816 | 0.0054 | 1.3234 | 0.0317 | 2 |
| 209160_at | 0.1178 | 0.9108 | 1.7767 | 0.0004 | 1.6589 | 0.0010 | 2 |
| 217685_at | 0.2692 | 0.7800 | 1.7533 | 0.0006 | 1.4842 | 0.0026 | 2 |
| 209498_at | 0.8324 | 0.2326 | 1.7335 | 0.0010 | 0.9011 | 0.0434 | 2 |
| 208596_s_at | 0.2725 | 0.7014 | 1.7249 | 0.0003 | 1.4524 | 0.0012 | 2 |
| 201926_s_at | 0.6294 | 0.2737 | 1.6951 | 0.0005 | 1.0656 | 0.0074 | 2 |
| 220798_x_at | 0.1492 | 0.9067 | 1.6937 | 0.0011 | 1.5445 | 0.0035 | 2 |
| 209365_s_at | 0.6082 | 0.2952 | 1.6917 | 0.0005 | 1.0835 | 0.0066 | 2 |
| 215177_s_at | 0.3586 | 0.8503 | 1.6914 | 0.0195 | 1.3328 | 0.0639 | 2 |
| 220593_s_at | 0.3487 | 0.6811 | 1.6867 | 0.0007 | 1.3380 | 0.0039 | 2 |
| 218002_s_at | 0.1505 | 0.8972 | 1.6801 | 0.0008 | 1.5296 | 0.0026 | 2 |
| 204803_s_at | 0.2621 | 0.7871 | 1.6761 | 0.0008 | 1.4140 | 0.0033 | 2 |
| 220894_x_at | 0.3548 | 0.6506 | 1.6556 | 0.0006 | 1.3008 | 0.0037 | 2 |
| 203191_at | 0.1885 | 0.8641 | 1.6303 | 0.0010 | 1.4418 | 0.0035 | 2 |
| 203139_at | 0.2871 | 0.7611 | −1.2674 | 0.0036 | −1.5545 | 0.0021 | 1 |
| 219703_at | −0.6643 | 0.3329 | −1.2748 | 0.0041 | −0.6105 | 0.1313 | 2 |
| 219644_at | −0.5085 | 0.4415 | −1.2799 | 0.0023 | −0.7714 | 0.0402 | 2 |
| 204641_at | −0.4842 | 0.4573 | −1.3042 | 0.0018 | −0.8200 | 0.0276 | 2 |
| 218108_at | −0.1047 | 0.9311 | −1.3072 | 0.0028 | −1.2024 | 0.0066 | 2 |
| 206102_at | −0.5989 | 0.4280 | −1.3204 | 0.0042 | −0.7215 | 0.0888 | 2 |
| 209642_at | −0.6627 | 0.4330 | −1.3306 | 0.0077 | −0.6679 | 0.1551 | 2 |
| 218979_at | −0.1925 | 0.8562 | −1.3416 | 0.0027 | −1.1491 | 0.0091 | 2 |
| 218507_at | 0.0933 | 0.8945 | −1.3761 | 0.0003 | −1.4694 | 0.0002 | 1 |
| 203764_at | −0.3963 | 0.5346 | −1.3799 | 0.0009 | −0.9836 | 0.0085 | 2 |
| 205283_at | −0.2899 | 0.7809 | −1.3875 | 0.0033 | −1.0976 | 0.0159 | 2 |
| 204822_at | −0.5371 | 0.5065 | −1.3949 | 0.0034 | −0.8579 | 0.0504 | 2 |
| 219990_at | −0.5251 | 0.5239 | −1.4035 | 0.0035 | −0.8784 | 0.0475 | 2 |
| 204444_at | −0.5381 | 0.5673 | −1.4631 | 0.0048 | −0.9250 | 0.0567 | 2 |
| 209681_at | −0.1770 | 0.8817 | −1.4845 | 0.0023 | −1.3074 | 0.0070 | 2 |
| 217028_at | −0.3032 | 0.7002 | −1.4904 | 0.0008 | −1.1872 | 0.0045 | 2 |
| 203373_at | −0.4812 | 0.5225 | −1.5266 | 0.0012 | −1.0454 | 0.0148 | 2 |
| 219479_at | −0.5931 | 0.3889 | −1.5301 | 0.0012 | −0.9370 | 0.0234 | 2 |
| 219596_at | −0.2341 | 0.7852 | −1.6024 | 0.0006 | −1.3683 | 0.0021 | 2 |
| 206268_at | −0.5816 | 0.6684 | −1.7595 | 0.0078 | −1.1779 | 0.0625 | 2 |
| 205771_s_at | 0.9001 | 0.4579 | −1.8483 | 0.0084 | −2.7485 | 0.0018 | 2 |

TABLE 4

| | | | | DNA | | | |
|---|---|---|---|---|---|---|---|
| | NCBI Gene | | | SEQ | | Protein | |
| | (LocusLink) | Gene | Probe | ID | DNA | SEQ | Protein |
| Entry | Title | Symbol | Set ID | NO: | Accession | ID NO: | Accession |
| 1 | !! 602155016F1 | | 213350_at | 188 | BF680255.1 | | |
| | NIH_MGC_83 Homo | | | | | | |
| | sapiens cDNA clone | | | | | | |
| | IMAGE: 4296050 5′, | | | | | | |
| | mRNA sequence | | | | | | |
| 2 | serpin | SERPINE2 | 212190_at | 189 | NM_006216.2 | 190 | NP_006207.1 |
| | peptidase | | | | | | |
| | inhibitor, | | | | | | |
| | clade E | | | | | | |
| | (nexin, | | | | | | |
| | plasminogen | | | | | | |
| | activator | | | | | | |
| | inhibitor | | | | | | |
| | type 1), | | | | | | |
| | member 2 | | | | | | |
| 3 | carcinoembryonic | CEACAM1 | 206576_s_at | 191; | NM_001024912.1; | 192; | NP_001020083.1; |
| | antigen- | | | 193 | NM_001712.3 | 194 | NP_001703.2 |
| | related cell | | | | | | |
| | adhesion | | | | | | |
| | molecule 1 | | | | | | |
| | (biliary | | | | | | |
| | glycoprotein) | | | | | | |
| 4 | !! 601306794F1 | | 212044_s_at | 195 | BE737027.1 | | |
| | NIH_MGC_39 Homo | | | | | | |
| | sapiens cDNA clone | | | | | | |
| | IMAGE: 3641231 5′, | | | | | | |
| | mRNA sequence \|\| | | | | | | |
| | ENST00000314138 | | | | | | |
| | 1476 30/2003 | | | | | | |
| 5 | matrix | MMP7 | 204259_at | 196 | NM_002423.3 | 197 | NP_002414.1 |
| | metallopeptidase 7 | | | | | | |
| | (matrilysin, | | | | | | |
| | uterine) | | | | | | |
| 6 | carcinoembryonic | CEACAM1 | 211889_x_at | 193; | NM_001712.3; | 194; | NP_001703.2; |
| | antigen- | | | 198 | D12502.1 | 199 | BAA02063.1 |
| | related cell | | | | | | |
| | adhesion | | | | | | |
| | molecule 1 | | | | | | |
| | (biliary | | | | | | |
| | glycoprotein) | | | | | | |
| 7 | !! clone | | 216246_at | 200 | AF113008.1 | | |
| | FLB0708 | | | | | | |
| | mRNA | | | | | | |
| | sequence | | | | | | |
| 8 | aldo-keto | AKR1C3 | 209160_at | 201 | NM_003739.4 | 202 | NP_003730.4 |
| | reductase | | | | | | |
| | family 1, | | | | | | |
| | member C3 | | | | | | |
| | (3-alpha | | | | | | |
| | hydroxysteroid | | | | | | |
| | dehydrogenase, | | | | | | |
| | type II) | | | | | | |
| 9 | !! NHTBCae03g02r1 | | 217685_at | 203 | AA853175.1 | | |
| | Normal Human | | | | | | |
| | Trabecular Bone Cells | | | | | | |
| | Homo sapiens cDNA | | | | | | |
| | clone | | | | | | |
| | NHTBCae03g02, | | | | | | |
| | mRNA sequence | | | | | | |
| 10 | carcinoembryonic | CEACAM1 | 209498_at | 191; | NM_001024912.1; | 192; | NP_001020083.1; |
| | antigen- | | | 193 | NM_001712.3 | 194 | NP_001703.2 |
| | related cell | | | | | | |
| | adhesion | | | | | | |
| | molecule 1 | | | | | | |
| | (biliary | | | | | | |
| | glycoprotein) | | | | | | |
| 11 | UDP | UGT1A1; | 208596_s_at | 204; | NM_000463.2; | 205; | NP_000454.1; |
| | glucuronosyl | UGT1A3; | | 206; | NM_001072.2; | 207; | NP_001063.2; |
| | transferase 1 | UGT1A4; | | 208; | NM_007120.2; | 209; | NP_009051.1; |
| | family, | UGT1A5; | | 210; | NM_019075.2; | 211; | NP_061948.1; |
| | polypeptide | UGT1A6; | | 212; | NM_019076.4; | 213; | NP_061949.3; |
| | A1; UDP | UGT1A7; | | 214; | NM_019077.2; | 215; | NP_061950.2; |
| | glucuronosyl | UGT1A8; | | 216; | NM_019078.1; | 217; | NP_061951.1; |
| | transferase 1 | UGT1A9; | | 218; | NM_019093.2; | 219; | NP_061966.1; |
| | family, | UGT1A10 | | 220; | NM_021027.2; | 221; | NP_066307.1; |
| | polypeptide | | | 222 | NM_205862.1 | 223 | NP_995584.1 |
| | A3; UDP | | | | | | |
| | glucuronosyl | | | | | | |
| | transferase 1 | | | | | | |
| | family, | | | | | | |
| | polypeptide | | | | | | |
| | A4; UDP | | | | | | |
| | glucuronosyl | | | | | | |
| | transferase 1 | | | | | | |
| | family, | | | | | | |
| | polypeptide | | | | | | |
| | A5; UDP | | | | | | |
| | glucuronosyl | | | | | | |
| | transferase 1 | | | | | | |
| | family, | | | | | | |
| | polypeptide | | | | | | |
| | A6; UDP | | | | | | |
| | glucuronosyl | | | | | | |
| | transferase 1 | | | | | | |
| | family, | | | | | | |
| | polypeptide | | | | | | |
| | A7; UDP | | | | | | |
| | glucuronosyl | | | | | | |
| | transferase 1 | | | | | | |
| | family, | | | | | | |
| | polypeptide | | | | | | |
| | A8; UDP | | | | | | |
| | glucuronosyl | | | | | | |
| | transferase 1 | | | | | | |
| | family, | | | | | | |
| | polypeptide | | | | | | |
| | A9; UDP | | | | | | |
| | glucuronosyl | | | | | | |
| | transferase 1 | | | | | | |
| | family, | | | | | | |
| | polypeptide | | | | | | |
| | A10 | | | | | | |
| 12 | CD55 | CD55 | 201926_s_at | 224 | NM_000574.2 | 225 | NP_000565.1 |
| | molecule, | | | | | | |
| | decay | | | | | | |
| | accelerating | | | | | | |
| | factor for | | | | | | |
| | complement | | | | | | |
| | (Cromer | | | | | | |
| | blood group) | | | | | | |
| 13 | plasticity- | MBP | 220798_x_at | 226 | NM_024888.1 | 227 | NP_079164.1 |
| | related gene 2 | (*) | | | | | |
| 14 | Extracellular | ECM1 | 209365_s_at | 228; | NM_004425.2; | 229; | NP_004416.1; |
| | matrix | | | 230 | NM_022664.1 | 231 | NP_073155.1 |
| | protein 1 | | | | | | |
| 15 | integrin, | ITGA6 | 215177_s_at | 232 | NM_000210.2 | 233 | NP_000201.2 |
| | alpha 6 | | | | | | |
| 16 | Coiled-coil | CCDC40 | 220593_s_at | 234; | XM_371082.3; | 235; | XP_371082.1; |
| | domain | | | 236; | XM_930250.2; | 237; | XP_935343.1; |
| | containing | | | 238; | XM_934521.2; | 239; | XP_939614.1; |
| | 40 | | | 240; | XM_942690.2; | 241; | XP_947783.1; |
| | | | | 242 | XM_946231.2 | 243 | XP_951324.1 |
| 17 | Chemokine | CXCL14 | 218002_s_at | 244 | NM_004887.3 | 245 | NP_004878.2 |
| | (C—X—C | | | | | | |
| | motif) ligand | | | | | | |
| | 14 | | | | | | |
| 18 | Ras-related | RRAD | 204803_s_at | 246 | NM_004165.1 | 247 | NP_004156.1 |
| | associated | | | | | | |
| | with | | | | | | |
| | diabetes | | | | | | |
| 19 | PR domain | PRDM12 | 220894_x_at | 248 | NM_021619.2 | 249 | NP_067632.2 |
| | containing | | | | | | |
| | 12 | | | | | | |
| 20 | ATP-binding | ABCB6 | 203191_at | 250; | AF308472.1; | 251; | AAG33617.1; |
| | cassette, | | | 252 | NM_005689.1 | 253 | NP_005680.1 |
| | sub-family B | | | | | | |
| | (MDR/TAP), | | | | | | |
| | member 6 | | | | | | |
| 21 | Death- | DAPK1 | 203139_at | 254 | NM_004938.2 | 255 | NP_004929.2 |
| | associated | | | | | | |
| | protein | | | | | | |
| | kinase 1 | | | | | | |
| 22 | Meiosis- | MNS1 | 219703_at | 256 | NM_018365.1 | 257 | NP_060835.1 |
| | specific | | | | | | |
| | nuclear | | | | | | |
| | structural 1 | | | | | | |
| 23 | coiled-coil | CCDC41 | 219644_at | 258; | NM_001042399.1; | 259; | NP_001035858.1; |
| | domain | | | 260 | NM_016122.2 | 261 | NP_057206.2 |
| | containing | | | | | | |
| | 41 | | | | | | |
| 24 | NIMA | NEK2 | 204641_at | 262 | NM_002497.2 | 263 | NP_002488.1 |
| | (Never in | | | | | | |
| | mitosis gene | | | | | | |
| | a)-related | | | | | | |
| | kinase 2 | | | | | | |
| 25 | chromosome | C14orf130 | 218108_at | 264 | NM_018108.2 | 265 | NP_060578.2 |
| | 14 open | | | | | | |
| | reading | | | | | | |
| | frame 130 | | | | | | |
| 26 | GINS | GINS1 | 206102_at | 266 | NM_021067.3 | 267 | NP_066545.3 |
| | complex | | | | | | |
| | subunit 1 | | | | | | |
| | (Psfl | | | | | | |
| | homolog) | | | | | | |
| 27 | BUB1 | BUB1 | 209642_at | 268 | NM_004336.2 | 269 | NP_004327.1 |
| | budding | | | | | | |
| | uninhibited | | | | | | |
| | by | | | | | | |
| | benzimidazoles 1 | | | | | | |
| | homolog | | | | | | |
| | (yeast) | | | | | | |
| 28 | RMI1, RecQ | RMI1 | 218979_at | 270 | NM_024945.1 | 271 | NP_079221.1 |
| | mediated | | | | | | |
| | genome | | | | | | |
| | instability 1, | | | | | | |
| | homolog (S. cerevisiae) | | | | | | |
| 29 | hypoxia- | HIG2 | 218507_at | 272 | NM_013332.1 | 273 | NP_037464.1 |
| | inducible | (*) | | | | | |
| | protein 2 | | | | | | |
| 30 | discs, large | DLG7 | 203764_at | 274 | NM_014750.3 | 275 | NP_055565.2 |
| | homolog 7 | | | | | | |
| | (Drosophila) | | | | | | |
| 31 | Fukuyama | FCMD | 205283_at | 276 | NM_006731.2 | 277 | NP_006722.2 |
| | type | | | | | | |
| | congenital | | | | | | |
| | muscular | | | | | | |
| | dystrophy | | | | | | |
| | (fukutin) | | | | | | |
| 32 | TTK protein | TTK | 204822_at | 278 | NM_003318.3 | 279 | NP_003309.2 |
| | kinase | | | | | | |
| 33 | E2F | E2F8 | 219990_at | 280 | NM_024680.2 | 281 | NP_078956.2 |
| | transcription | | | | | | |
| | factor 8 | | | | | | |
| 34 | Kinesin | KIF11 | 204444_at | 282 | NM_004523.2 | 283 | NP_004514.2 |
| | family | | | | | | |
| | member 11 | | | | | | |
| 35 | Solute | SLC19A2 | 209681_at | 284 | NM_006996.1 | 285 | NP_008927.1 |
| | carrier | | | | | | |
| | family 19 | | | | | | |
| | (Thiamine | | | | | | |
| | transporter), | | | | | | |
| | member 2 | | | | | | |
| 36 | Chemokine | CXCR4 | 217028_at | 286; | NM_001008540.1; | 287; | NP_001008540.1; |
| | (C—X—C | | | 288 | NM_003467.2 | 289 | NP_003458.1 |
| | motif) | | | | | | |
| | receptor 4 | | | | | | |
| 37 | Suppressor | SOCS2 | 203373_at | 290 | NM_003877.3 | 291 | NP_003868.1 |
| | of cytokine | | | | | | |
| | signaling 2 | | | | | | |
| 38 | KDEL (Lys- | KDELC1 | 219479_at | 292 | NM_024089.1 | 293 | NP_076994.1 |
| | Asp-Glu- | | | | | | |
| | Leu) | | | | | | |
| | containing 1 | | | | | | |
| 39 | THAP | THAP10 | 219596_at | 294 | NM_020147.2 | 295 | NP_064532.1 |
| | domain | | | | | | |
| | containing | | | | | | |
| | 10 | | | | | | |
| 40 | Left-right | LEFTY1 | 206268_at | 296 | NM_020997.2 | 297 | NP_066277.1 |
| | determination | | | | | | |
| | factor 1 | | | | | | |
| 41 | A kinase | AKAP7 | 205771_s_at | 298; | NM_004842.2; | 299; | NP_004833.1; |
| | (PRKA) | | | 300; | NM_016377.2; | 301; | NP_057461.1; |
| | anchor | | | 302 | NM_138633.1 | 303 | NP_619539.1 |
| | protein 7 | | | | | | |

### CEACAM1 (Carcinoembryonic Antigen-Related Cell Adhesion Molecule 1)

[0098] 3 probe sets for CEACAM1 (206576_s_at, 211889_x_at, 209498_at) all showed significant increase in expression by compound 1 treatment at 17 days, but not by bevacizumab treatment (Table 3A). CEACAM family of proteins has been implicated in various intercellular-adhesion and intracellular signaling-mediated effects that govern the growth and differentiation of normal and cancerous cells. CEA-family members have crucial roles in vascular neogenesis, insulin metabolism, tumor development, and apoptosis, and as receptors for pathogenic bacteria and viruses.

[0099] CEACAM1 is expressed in microvessels of proliferating tissues, in tissues after wounding, and in solid human tumors. CEACAM1 stimulates proliferation, chemotaxis, and tube formation in microvascular human endothelial cells (C. Wagener et al., Exp Cell Res., November 25; 261(1):19-24 (2000)). CEACAM1-overexpressing microvascular endothelial cells showed prolonged survival and increased tube formation when they were stimulated with vascular endothelial growth factor (VEGF), whereas CEACAM1 silencing via small interfering RNA blocks these effects. In CEACAM1-overexpressing microvascular endothelial cells there is an up-regulation of angiogenic factors such as VEGF, VEGF receptor 2, angiopoietin-1, angiopoietin-2, tie-2, angiogenin, and interleukin-8 but a down-regulation of collagen XVIII/endostatin and Tie-1. These results suggest that constitutive expression of CEACAM1 in microvascular endothelial cells switches them to an angiogenic phenotype, whereas CEACAM1 silencing apparently abrogates the VEGF-induced morphogenetic effects during capillary formation (N. Kilic et al., J. Biol. Chem., January 21; 280(3):2361-9 (2005)).

[0100] One noteworthy point is that CEACAM1 down-regulation in prostate or bladder cancer cell lines is inversely correlated with its up-regulation in adjacent blood vessels. Supernatant of CEACAM1-overexpressing tumor cells suppressed but that of CEACAM1-silenced increased the VEGF-induced endothelial tubes (D. Tilki et al., Oncogene, March 27 (2006); L. Oliveira-Ferrer et al., Cancer Res., December 15; 64(24):8932-8 (2004)). This indicates that epithelial down-regulation and endothelial up-regulation of CEACAM1 act synergistically and lead to activation of angiogenesis and thus promotes tumor vascularization and invasion.

[0101] In our experiment, VEGF and VEGFB were both up-regulated by compound 1 at 17 days, along with up-regulation of CEACAM1. Expression of Collagen 18, the maternal substance of the angiogenesis inhibitor endostatin, was also up-regulated under the same condition (FIG. 4). Such up-regulation only happened in xenografts tumor tissues, but not in mouse stroma cells. The expression levels of these four genes were also significantly correlated with each other. One possible explanation of such expressional changes is that compound 1 induces CEACAM1 expression in tumor cells, which in turn suppresses VEGF-induced endothelial tube formation. Such angiogenesis suppression by CEACAM1 may cause compensatory up-regulation of VEGFs. On the other hand, expression of CEACAM1 in mouse epithelial cells did not change, possibly due to the anti-angiogenesis effect of compound 1 which inhibits tumor progression and invasion.

[0102] Endostatin, a 20-kd proteolytic fragment of collagen XVIII, is a major constituent of blood vessels throughout the body. The up-regulation of Endostatin, which has been shown to have antiangiogenic and antitumor activity before, also blocks endothelial migration and reduces VEGF-induced endothelial tube formation. This is consistent with the anti-angiogenesis activities of compound 1.

### AKAP7 (A Kinase (PRKA) Anchor Protein)

[0103] This gene encodes a member of the A-kinase anchoring protein (AKAP) family, a group of functionally related proteins that bind to a regulatory subunit (RII) of cAMP-dependent protein kinase A (PKA) and target the enzyme to specific subcellular compartments. AKAPs have a common RII-binding domain, but contain different targeting motifs responsible for directing PKA to distinct intracellular locations. In cell culture, interference of human AKAP7 mRNA in Hela cells by siRNA decreases survival of Hela cells (J. MacKeigan et al., J. Nat Cell Biol., June; 7(6):591-600 (2005)). In our experiment, AKAP7 was inhibited 3.5 fold (FDR q<0.008) upon compound 1 treatment at 17 days (FIG. 4). On the other hand, bevacizumab increased the expression levels of this protein. This indicated that compound 1 may have an advantage in promoting cell apoptosis compared to bevacizumab.

### Example 2

### Production of Antibodies Against the Biomarkers:

[0104] Antibodies against the biomarkers can be prepared by a variety of methods. For example, cells expressing an biomarker polypeptide can be administered to an animal to induce the production of sera containing polyclonal antibodies directed to the expressed polypeptides. In one aspect, the biomarker protein is prepared and isolated or otherwise purified to render it substantially free of natural contaminants, using techniques commonly practiced in the art. Such a preparation is then introduced into an animal in order to produce polyclonal antisera of greater specific activity for the expressed and isolated polypeptide.

[0105] In one aspect, the antibodies of the invention are monoclonal antibodies (or protein binding fragments thereof). Cells expressing the biomarker polypeptide can be cultured in any suitable tissue culture medium, however, it is preferable to culture cells in Earle's modified Eagle's medium supplemented to contain 10% fetal bovine serum (inactivated at about 56° C.), and supplemented to contain about 10 g/l nonessential amino acids, about 1,00 U/ml penicillin, and about 100 μg/ml streptomycin.

[0106] The splenocytes of immunized (and boosted) mice can be extracted and fused with a suitable myeloma cell line. Any suitable myeloma cell line can be employed in accordance with the invention, however, it is preferable to employ the parent myeloma cell line (SP2/0), available from the ATCC. After fusion, the resulting hybridoma cells are selectively maintained in HAT medium, and then cloned by limiting dilution as described by Wands et al. (1981, Gastroenterology, 80:225-232). The hybridoma cells obtained through such a selection are then assayed to identify those cell clones that secrete antibodies capable of binding to the polypeptide immunogen, or a portion thereof.

[0107] Alternatively, additional antibodies capable of binding to the biomarker polypeptide can be produced in a two-step procedure using anti-idiotypic antibodies. Such a method makes use of the fact that antibodies are themselves antigens and, therefore, it is possible to obtain an antibody that binds to a second antibody. In accordance with this method, protein specific antibodies can be used to immunize an animal, preferably a mouse. The splenocytes of such an immunized animal are then used to produce hybridoma cells, and the hybridoma cells are screened to identify clones that produce an antibody whose ability to bind to the protein-specific antibody can be blocked by the polypeptide. Such antibodies comprise anti-idiotypic antibodies to the protein-specific antibody and can be used to immunize an animal to induce the formation of further protein-specific antibodies.

### Example 3

### Immunofluorescence Assays:

[0108] The following immunofluorescence protocol may be used, for example, to verify VEGFR-2 biomarker protein expression on cells or, for example, to check for the presence of one or more antibodies that bind VEGFR-2 biomarkers expressed on the surface of cells. Briefly, Lab-Tek II chamber slides are coated overnight at 4° C. with 10 micrograms/milliliter (μg/ml) of bovine collagen Type II in DPBS containing calcium and magnesium (DPBS++). The slides are then washed twice with cold DPBS++ and seeded with 8000 CHO-CCR5 or CHO pC4 transfected cells in a total volume of 125 μl and incubated at 37° C. in the presence of 95% oxygen/5% carbon dioxide.

[0109] The culture medium is gently removed by aspiration and the adherent cells are washed twice with DPBS++ at ambient temperature. The slides are blocked with DPBS++ containing 0.2% BSA (blocker) at 0-4° C. for one hour. The blocking solution is gently removed by aspiration, and 125 μl of antibody containing solution (an antibody containing solution may be, for example, a hybridoma culture supernatant which is usually used undiluted, or serum/plasma which is usually diluted, e.g., a dilution of about 1/100 dilution). The slides are incubated for 1 hour at 0-4° C. Antibody solutions are then gently removed by aspiration and the cells are washed five times with 400 μl of ice cold blocking solution. Next, 125 μl of 1 μg/ml rhodamine labeled secondary antibody (e.g., anti-human IgG) in blocker solution is added to the cells. Again, cells are incubated for 1 hour at 0-4° C.

[0110] The secondary antibody solution is then gently removed by aspiration and the cells are washed three times with 400 μl of ice cold blocking solution, and five times with cold DPBS++. The cells are then fixed with 125 μl of 3.7% formaldehyde in DPBS++ for 15 minutes at ambient temperature. Thereafter, the cells are washed five times with 400 μl of DPBS++ at ambient temperature. Finally, the cells are mounted in 50% aqueous glycerol and viewed in a fluorescence microscope using rhodamine filters.

What is claimed is:

1. A method for identifying a mammal that will respond therapeutically to a method of treating cancer comprising administering an VEGFR-2 modulator, wherein the method comprises:
(a) measuring in the mammal the level of at least one biomarker selected from the biomarkers of Tables 2-4;
(b) exposing the mammal to the VEGFR-2 modulator;
(c) following the exposing of step (b), measuring in the mammal the level of the at least one biomarker,
wherein a difference in the level of the at least one biomarker measured in step (c) compared to the level of the at least one biomarker measured in step (a) indicates that the mammal will respond therapeutically to said method of treating cancer.

2. The method of claim 1 wherein the method is an in vitro method, and wherein the at least one biomarker is measured in at least one mammalian biological sample from the mammal.

3. A method for identifying a mammal that will respond therapeutically to a method of treating cancer comprising administering an VEGFR-2 modulator, wherein the method comprises:
(a) exposing the mammal to the VEGFR-2 modulator;
(b) following the exposing of step (a), measuring in the mammal the level of the at least one biomarker selected from the biomarkers of Tables 2-4,
wherein a difference in the level of the at least one biomarker measured in step (b), compared to the level of the biomarker in a mammal that has not been exposed to said VEGFR-2 modulator, indicates that the mammal will respond therapeutically to said method of treating cancer.

The application's sequence listing, which the Patent Office published only in electronic form, follows.

SEQUENCE LISTING (303 sequences)

SEQ ID NO: 1 - DNA, 521 bp, Mus musculus
gaggggttgaactccacctccaggcagaatgaggctcagcacagcaacgctgcttctcctcctggccagctgcctctctccaggccacggtattctggaagcccattacacaaacttaaaatgtaggtgttctggagtgatttcaactgttgtcggtctaaacatcatagatcggattcaagttacgccccctgggaatggctgccccaaaactgaagttgtgatctggaccaagatgaagaaagttatatgtgtgaatcctcgtgccaaatggttacaaagattataagacatgtccaaagcaaaagtctgtcttcaactccccaagctccagtgagtaagagaagagctgcctgaagccactatcatctcaaaagacacacctgcacctttttttttatccctgctctgaattttagatatgttcttagttaaagaatttccaagaaaataactcccctctacaaacaaacatgactgtaggtaaaacaaagcaaaaacaaacaagcaaacaaacaaac

SEQ ID NO: 2 - protein, 86 aa, Mus musculus
MRLSTATLLLLLASCLSPGHGILEAHYTNLKCRCSGVISTVVGLNIIDRIQVTPPGNGCPKTEVVIWTKMKKVICVNPRAKWLQRL

SEQ ID NO: 3 - DNA, 1162 bp, Mus musculus
gagctaaaggttgaactccacctccaggcagaatgaggctcagcacagcaacgctgcttctcctcctggccagctgcctctctccaggccacggtattctggaagcccattacacaaacttaaaatgtaggtgttctggagtgatttcaactgttgtcggtctaaacatcatagatcggattcaagttacgccccctgggaatggctgccccaaaactgaagttgtgatctggaccaagatgaagaaagttatatgtgtgaatcctcgtgccaaatggttacaaagattattaagacatgtccaaagcaaaagtctgtcttcaactccccaagctccagtgagtaagagaagagctgcctgaagccactatcatctcaaaagacacacctgcacctttttttttatccctgctctgaattttagatatgttcttagttaaagaatttccaagaaaataactcccctctacaaacaaacatgactgtaggtaaaacaaagcaaaaacaaacaagcaaacaaacaaactaaaaaaaacccaatcctgcaggagctgagagggaatgctcaagctccgttgcatacccaacccacatccttgttccttaagaaaggctatttgagaacaggcatttagtgacaacccacttcagatgcatgtggtaatagatctgttgtttaatgttaaactatcctagattgtcgaggaatgaaaaacctacatgtcaaatgtgaacttgtagctcgtactaacaagaggtttgcgagatggacttcagttattttgcacccttgtaaaacgcaggcttccaaaatagtctccagaaggttcctgggaagctggtgcaatgccatcatgaggtggtgcaaagcaggtctcctttagagaaaagcttcctgggggaaacagtcctactttgaaaggttgcttgtataagatttattgtcttgcattaaaaccagtaacaattgaaagatcctcagcttaaaggtccaggctcttcagcagtatacaaatatattcctttgcactgtgaccctgatgatctatttttattattcatatctttcacacagacaaaataccagcctcttgtatcagattctttaatgtttcctattcatctggtgtcattcaataaatgtaatcaaatgttttgctta

SEQ ID NO: 4 - DNA, 1162 bp, Mus musculus; identical to SEQ ID NO: 3

SEQ ID NO: 5 - protein, 109 aa, Mus musculus
MRLSTATLLLLLASCLSPGHGILEAHYTNLKCRCSGVISTVVGLNIIDRIQVTPPGNGCPKTEVVIWTKMKKVICVNPRAKWLQRLLRHVQSKSLSSTPQAPVSKRRAA

SEQ ID NO: 6 - DNA, 392 bp, Mus musculus
atcctttgtcagctccgtcttcaagacatcgtttgaaaggaaatctttcgtgacaatgccgtctgaactggagaaggccttgagcaacctcattgatgtctaccacaattattccaatatacaaggaaatcaccatgccctctacaagaatgacttcaagaaaatggtcactactgagtgtcctcagtttgtgcagaatataaatatcgaaaacttgttcagagaattggacatcaatagtgacaatgcaattaacttcgaggagttccttgcgatggtgataaaagtgggtgtggcatctcacaaagacagccacaaggagtagcagagcttctggcctagggctgggtccctggatatgtctacagaataaagtcatcatatctcaggtc

SEQ ID NO: 7 - protein, 89 aa, Mus musculus
MPSELEKALSNLIDVYHNYSNIQGNHHALYKNDFKKMVTTECPQFVQNINIENLFRELDINSDNAINFEEFLAMVIKVGVASHKDSHKE

SEQ ID NO: 8 - DNA, 488 bp, Mus musculus
aacatctgtgactctttagccttgagcaagaagatggccaacaaagcaccttctcagatggagcgcagcataaccaccatcatcgacaccttccatcaatactctaggaaggaaggacaccctgacaccctgagcaagaaggaattcagacaaatggtggaagcacagttggcaacctttatgaagaaagagaagagaaatgaagccctcataaatgacatcatggaggacctggacacaaaccaggacaatcagctgagctttgaggagtgtatgatgctgatggcaaagttgatctttgcctgtcatgagaagctgcatgagaacaacccacgtgggcatggccacagtcatggcaaaggctgtgggaagtaattaagaggtcagccatgtgactgctgcccaaccaagtctaaagggaatggcttactcaatggcctttgttctgggaaatgataagataaataataaataagtctttatccatt

SEQ ID NO: 9 - protein, 113 aa, Mus musculus
MANKAPSQMERSITTIIDTFHQYSRKEGHPDTLSKKEFRQMVEAQLATFMKKEKRNEALINDIMEDLDTNQDNQLSFEECMMLMAKLIFACHEKLHENNPRGHGHSHGKGCGK

SEQ ID NO: 10 - DNA, 1497 bp, Mus musculus
cagggtgacaccccaggattacataaatttacaggggctgccaaattggtcgaacaagcccgtggaacctggaagccagagaacaccaccgctgtaaaggaaagaaactgaagcctttctcggagcctatctgggctgctcaaactttcagaatctaccgaccatggagcgtgtgcttggcttgttgctgttgcttctggtgcacgcctctcccgccccaccagagccctgcgagctagacgaggaaagttgttcctgcaacttctcagatccgaagccagattggtccagcgctttcaattgtttgggggcggcagatgtggaattgtacggcggcggccgcagcctggaataccttctaaagcgtgtggacacggaagcagatctggggcagttcactgatattatcaagtctctgtccttaaagcggcttacggtgcgggccgcgcggattcctagtcggattctattcggagccctgcgtgtgctcgggatttccggcctccaggaactgactcttgaaaatctcgaggtaaccggcaccgcgccgccaccgcttctggaagccaccggacccgatctcaacatcttgaacctccgcaacgtgtcgtgggcaacaagggatgcctggctcgcagaactgcagcagtggctaaagcctggactcaaggtactgagtattgcccaagcacactcgctcaacttttcctgcgaacaggtccgcgtcttccctgccctctccaccttagacctgtctgacaatcctgaattgggcgagagaggactgatctcagccctctgtcccctcaagttcccgaccctccaagttttagcgctgcgtaacgcggggatggagacgcccagcggcgtgtgctctgcgctggccgcagcaagggtacagctgcaaggactagaccttagtcacaattcactgcgggatgctgcaggcgctccgagttgtgactggcccagtcagctaaactcgctcaatctgtctttcactgggctgaagcaggtacctaaagggctgccagccaagctcagcgtgctggatctcagttacaacaggctggataggaaccctagcccagatgagctgccccaagtggggaacctgtcacttaaaggaaatccctttttggactctgaatcccactcggagaagtttaactctggcgtagtcaccgccggagctccatcatcccaagcagtggccttgtcaggaactctggctttgctcctaggagatcgcctctttgtttaaggaacatttgcatcctcctggtttctgagggtcctcgtcaacgaatcctctgctttaaatttattaaaatcttaatccacgatgtaaggaaagaaaggcagtcaagatggttcagtgggtaaaagccagcaaacttgacccctgattttaaccctcaggatccacacggaaggggaaaactcactcctgaaagttgtccatctgtgctcacaaataaatattttttaaaataa

SEQ ID NO: 11 - protein, 366 aa, Mus musculus
MERVLGLLLLLLVHASPAPPEPCELDEESCSCNFSDPKPDWSSAFNCLGAADVELYGGGRSLEYLLKRVDTEADLGQFTDIIKSLSLKRLTVRAARIPSRILFGALRVLGISGLQELTLENLEVTGTAPPPLLEATGPDLNILNLRNVSWATRDAWLAELQQWLKPGLKVLSIAQAHSLNFSCEQVRVFPALSTLDLSDNPELGERGLISALCPLKFPTLQVLALRNAGMETPSGVCSALAAARVQLQGLDLSHNSLRDAAGAPSCDWPSQLNSLNLSFTGLKQVPKGLPAKLSVLDLSYNRLDRNPSPDELPQVGNLSLKGNPFLDSESHSEKFNSGVVTAGAPSSQAVALSGTLALLLGDRLFV

SEQ ID NO: 12 - DNA, 2999 bp, Mus musculus
tcaggctgcagcagagccccgagagctttgtgaaggaggaccgccgcacacccgcctccggcacacacagccaaccacagctgagcgacagccaacaagagccaatcacaaggcacctttgaatactcaggatgcagatgtcttcagcccttgcttgcctcatcctgggcctggttctggtctctgggaaagggttcactttacccctccgagaatcccacacagcccatcaggccaccgacttcggagtaaaagtgtttcagcaggtggtccaggcctccaaagaccggaatgtggtcttctctccctatggcgtgtcctcggtgctggctatgctgcagatgaccacagcggggaaaacccggcggcagatccaagatgctatgggattcaaagtcaatgagaagggcacagctcatgccctccgccagctctccaaggagctcatggggccgtggaacaagaatgagatcagtactgcggatgccatctttgtccagcgggacctagagctggtccagggcttcatgccccacttcttcaagctcttccagactatggtgaaacaggtggacttctcagaggtggaaagagccagatttatcatcaatgactgggtggaaaggcataccaaaggtatgatcaatgacttactggccaagggggctgtagacgagctgacacgcctggtgctggtgaatgccctctacttcagtggccaatggaagacccctttcttagaggccagcacccaccagcgcctcttccacaagtctgatggcagcaccgtctctgtgcccatgatggctcagagcaacaagttcaactacactgagttcaccacccccgatgggctcgagtatgacgtcgtggaactgccctaccagcgggacaccctcagcatgttcatcgctgcaccctttgagaaagatgtgcacctctccgccctcaccaacatcttggatgctgaactcatcagacaatggaagggcaacatgaccaggctgccccgcctcctcatcctgcctaagttctctctggagactgaagtggacctcagagggcccctggagaagttgggcatgcctgacatgtttagtgcaaccctggccgacttcacaagtctttccgaccaagagcagctctctgtagcacaggcactgcaaaaggtcaggatcgaggtaaacgagagcggcacagtggcgtcttcctccacagcctttgtcatctcagcccgcatggcccccacggagatggttatagaccgatcctttctctttgtggttcggcacaacccgacagagacaatcctcttcatggggcaagtgatggagccttgacagtgggaagagacgccttcatttggacgaaactggagatgttataagcagaaactctgaagaaaaggttatttaaaggactctatggggagaaagagaaggcaactcctccttaccccccacactggtaatctttccaaccagcatcccagacctcggactcttgaagggaaaagagtctaactccctcctccctagggattcctaccccacaaaggtctcatggaccatagaactcacagtacctggatctgcccagcatgccctttggacccagttcccaccgaggccccagcagagtggagggcacaacactttcattcagcaaaatcgtttgtgttccagtcacactgtgggcacctcttgcatcgcctgccattgctgtggagggtgccatgggccaaaggaaaaagcactgtcctatctcaaggtccactgtggaaatgtccaccttgcccacctccaaggggcaacggatagacagatcaaatggtggcccaatagcgagccttctccctgctccctcccttgacacagcttgcttatgttatttcagagtgtaggtgacttgtttacacagcttttttcgacccacaaacttttttcatttggaaagggtgtaagaaaagtcggacgtgtgtgtgcctggctcttcgtccccagtctcccagtgggggggccctggggagattccaggggtgtgattgaatatttatctcttgctcttgtatgtttgttggggagaagaagcacttttaaggaaaatgcttcttatttaaaccgtggcatacggcatcccatttggggtctgcatccctgtatgtcaggggtgcatcactccacaaacctgcccctctgggtagcctcgtgatggggctcacactgccgcctagtggcagccgaacacacccttacccggtccctccctccctccccccccccccccccccccgtggctctttttccttagggaccttgccaaggtgatgcttggcaacccacgttaaaggaaggggggaaaaaagattagatggaagagagagagatttgagagagggcaaagtggtttcaaatttttccaaggcatccagaagcagagagggaaaaggggctgtgtgacctaacaggacagaactttctccaattactgggtgagtcagagctgcactggtgactcacttcaatgtgtcatttccggctgctgtatgtgagcagtggacacgtgggggggcgggggggggatgaaagagacagcagctcctggtcaaccaccttagttagataatcttttttgaaagcttcctagctggaggtatgatcagaaaaccaatttactgaaaaactgcacaagaaggtaccgtgaatgaatttcctagcaggccactctgcatctgttatgtctccaccggaaaaaaaataatcatgttggtgtttttgcttttctctctctccctctttctctctgatttttttttcctctcttttcattatgcactggacagccacacaccgtgtaccatagggccccaaatgtggggtcacatggtcttgaattttgttggttacatatgcctttttgttgttgtttgtcttcacttttgatatataaacaggtaaatatgttttttaaaaaatactaaatatagagaatatgcaaac

SEQ ID NO: 13 - protein, 402 aa, Mus musculus
MQMSSALACLILGLVLVSGKGFTLPLRESHTAHQATDFGVKVFQQVVQASKDRNVVFSPYGVSSVLAMLQMTTAGKTRRQIQDAMGFKVNEKGTAHALRQLSKELMGPWNKNEISTADAIFVQRDLELVQGFMPHFFKLFQTMVKQVDFSEVERARFIINDWVERHTKGMINDLLAKGAVDELTRLVLVNALYFSGQWKTPFLEASTHQRLFHKSDGSTVSVPMMAQSNKFNYTEFTTPDGLEYDVVELPYQRDTLSMFIAAPFEKDVHLSALTNILDAELIRQWKGNMTRLPRLLILPKFSLETEVDLRGPLEKLGMPDMFSATLADFTSLSDQEQLSVAQALQKVRIEVNESGTVASSSTAFVISARMAPTEMVIDRSFLFVVRHNPTETILFMGQVMEP

SEQ ID NO: 14 - DNA, 556 bp, Mus musculus
ggtcgtgcgcaggcccaggggcgtgtgctggccatatcccttgagccagaaaaagggcgtgtgcaggcggcgggggcgcgtgcatggtgccttccacccgggcggagcttttgcgctcgacccaatactctccgctataaaggtcgcgctccgcgtgcttctctccatcacgctcctagaactcttcaaaccgatctctcgtcgatcttcaaccgccgcctccactcgccatggaccccaactgctcctgtgcctccgatggatcctgctcctgcgctggcgcctgcaaatgcaaacaatgcaaatgtacttcctgcaagaaaagctgctgctcctgctgccccgtgggctgtgcgaagtgctcccagggctgcatctgcaaagaggcttccgacaagtgcagctgctgtgcctgaaggggggcggaggggtccccacatctgtgtaaatagaccatgtagaagcctagccttttttgtacaaccctgactcgttctccacaactttttctataaagcatgtaactgacaataaaagccgttgacttgattaattc

SEQ ID NO: 15 - protein, 61 aa, Mus musculus
MDPNCSCASDGSCSCAGACKCKQCKCTSCKKSCCSCCPVGCAKCSQGCICKEASDKCSCCA

SEQ ID NO: 16 - DNA, 1848 bp, Mus musculus
gcgatgggtccggggcgggcggcagggcggtctgggagatctcctccccccaccacattgagaaatctcagtgagtcaccgagtggttctgcatattaatgagctcgctctccgagagggcaggagcgaatttaaaagaggccagggtgggcggagggaagctgtggggagatcgcagcacccagcgccaagcgcagcgcggcaccgcgacagacggcaggagcacccatcgacgggcgtagctggagcgagccgagcagagcagagagaggcgtgcttgaaaccgagaaccaagccgggcggcatcccccggccgccgcacgcacaggccggcgccctccttgcctccctgctccccaccgcgcccctccggccagcatgaggctcctggcggccgcgctgctcctgctgctcctggcgctgtgcgcctcgcgcgtggacgggtccaagtgtaagtgttcccggaaggggcccaagatccgctacagcgacgtgaagaagctggaaatgaagccaaagtacccacactgcgaggagaagatggttatcgtcaccaccaagagcatgtccaggtaccggggccaggagcactgcctgcaccctaagctgcagagcaccaaacgcttcatcaagtggtacaatgcctggaacgagaagcgcagggtctacgaagaatagggtggacgatcatggaaagaaaaactccaggccagttgagagacttcagcagaggactttgcagattaaaataaaagccctttctttctcacaagcataagacaaattatatattgctatgaagctcttcttaccagggtcagtttttacattttatagctgtgtgtgaaaggcttccagatgtgagatccagctcgcctgcgcaccagacttcattacaagtggctttttgctgggcggttggcggggggcggggggacctcaagcctttcctttttaaaataaggggttttgtatttgtccatatgtcaccacacatctgagctttataagcgcctgggaggaacagtgagcatggttgagaccgttcacagcactactgctccgctccaggcttacaaagcttccgctcagagagcctggcggctctgcgcagctgccacaggctctcctgggcttatgactggtcagagtttcagtgtgactccactgtggcccctgttgcagggcaattgggagcaggtccttctacatctgtgcctagaggaactcagtctacttaccagaaggagcttcatccccaccccacccccacccgcaccccagctcattcccctgtcacgaccaggcaagtgatccttaaaggagctgggtctttttcttgcaaactgagggtttctgaaaggtcccctgctttggtagaagatgcttctgaggcatccaaagtccccagcagtgtgagaaaatgatgctcgatgttcgggaggacaagggaagatgcaggattagatgcaggacacacagccagagctacacatcctcttggcaatgggagctccccccccccaaagctttgtttctttccctcaccccaacagaaagtgcactccccctcagtgaatacgcaaacagcactgttctctgagttaggatgttaggacgatcctgcgccctgccctctcctgtgtacatattgccttcagtacccctcccccaccccatgccacacactgcccctcattagaggccgcactgtatggctgtgtatctgctatgtaaatgctgagacccctgagtgctgcatgcaggtttcatgttctttctaagatgaaaagagaaagtaataaaatatatttgaagttaccaaaaaaaaaaaaaaaaaaaaaaaaa

SEQ ID NO: 17 - protein, 99 aa, Mus musculus
MRLLAAALLLLLLALCASRVDGSKCKCSRKGPKIRYSDVKKLEMKPKYPHCEEKMVIVTTKSMSRYRGQEHCLHPKLQSTKRFIKWYNAWNEKRRVYEE

SEQ ID NO: 18 - DNA, 3606 bp, Mus musculus
tggcagacacgcaccaactgggagaccagaacttctagctggctctctgctgccacagctccagcaaagggtggggaggaacagaagagtgccccagagtccagaggagaggcaggtgtgtgcaggtacatcacctggatcatgagggcatccttcttctggctcctcccacttctcctcatcttggcctcagtggcccaaggccaaccgacaagaccaaaacctgggattaggcgtaaacccaagccgaggcccacacccagatttcctcaggcccccgagccagcagagccgacagacctgcctccacctcttcctcccggccctccatctgtcttccctgactgtccacgggaatgctactgcccccctgacttcccgtcagccctctactgtgacagccgaaacctgcgaagggtccccgtcatcccaccccgaatccattacctttacttgcagaacaacttcatcactgagcttcctctggaatctttccagaatgccacgggcctgaggtgggtcaacctggacaacaaccgaattcgcaaggtggaccagagagtgctggggaagctccccagcctggcattcctctacatggagaagaaccagctggaagaggtgccatcagctctgccccggaacttggaacagctgaggctgagccagaacctcatttccaggatcccgcccggagtgttcagcaagctggagaacctgctgctcctggatctgcagcacaatcggctgagcgacggcgtcttcaaggccgacaccttccagggcctcaaaaacctcatgcagctcaatctagcccacaacatcctgagaaagatgccccccaaagtcccccaagccatccaccagctctacctggatagcaacaagatcgagaccatccccaacgggtacttcaaggacttccccaacctggccttcatccgcatgaactacaacaaactgtcagatcgcgggctccccaagaactccttcgacatctccaacttgctggtgctccacctgtctcacaacaagatcagcaacgtgccggccatcagcaacaagctggaacacctgtacctcaacaacaatagcatagagaaaatcaacgggacccagatttgccccaacaacctagtggccttccatgacttctcctcggatctggaaaacgtgccccacctgcgctacctgcggctggatggaaattttctgaagcctcccatcccactggacctcatgatgtgcttccgcctcctgcagtccgtggtcatctaggctgtgcccagagctggacctcctctgacagcacttgaaggctggtggcccaagctctggggtccactgtttttatctgtctccctctctcgctcccagccctgcccttcctctcgtcccttcgtgaggatggtaaatactgtataacctgctccggctctaaagcaagattccccacccagcccaaagacaccctgccagccaagacctctgctcttctttggtctccctttgcttcagaaacacaggtgtacgccaacagacatatcccctctcttcccccacaccacgagtctctcatgggtaaggctgggccatggactgacatcttattttagtcttagccgagtcagaagcagaagtcattccagaggtgaaccctggaaagttcctccattgagaactcccccatttgggtaactgtctcaagaaggccgacaaatccaggtctcctaggcctgagatcccttccaaagctgtcctctgccactgtttcctgacaccagacagatgtcaccctgttccctactgtctcgagttcttcagaaaggaagtgtgggggatgactaaggtggggtggagggtcagggtttccccacaacttccagcctttcctccgcttcccatctccctcctttggggcaaacacagtacacaccctcttggctgggcctcagaaaggaacagccagggacaaagtggtgcaaggaactagactttggctaataggagggtagctgtggggtcagagcccaaaactgggcctatgtggatgtcgccaagccctgcaatctcccttacccaaacttgacaatggagggccaagaggcatcacaccacttcatctgctctctattatgtgtgagactcagtcgagtcatcccaccccaagggcagttcttgagaaacagaggaagaggtggagcacctgggaatctcccagaagcctcttccatactggggattagcctctacctctaaggccgactcatcagcgacatctggtggctggtggcatgatactgcaattccctgattccctaggggaagagggccatgggctttctcctactgggtctgaaggaaagggcagaggctgggggttcattcctatcaggagtgattgtgaatgagaagtctttgagagtctaagggaagctagtttgacagaggccttgccagggctcattttgctctcggcttccacatctgtaaactgagtccctcccagagctcctgtttgtgcaccctcttctagagcacacctagcgcaggacaagtggcatcacccattctccctctgcagttaatttattccctgcatagagtgtccctcccccgcagacttgctaccctcctttcctagcccaggtgagcagcttggcgggtttccaagaacctgggctccctgcctttctcttcttcccttctcctccctcaccggaaggctgcctttgccctgccacacttgcctgggtggagaaggatgtggagatgaatgttctagaagtgagtgaggcacaggaccaattctccttaggctgggggagtctctggaggctttttcctctccccaagatggtgtcacacaactgttttaaaacattggattaggctgggccctatagtccagaaaccccatttatattccccatcacctttctcgcattgaaaatagagcccacttcacacaacctcttttccctgctgtgcaacttcctcaccctagttgcagctggtttctccaaggctcctgcttaagtcaatgtatcattacggctgaaagcaacctggtgctacagcctggacaagccccttctgcacctatgacaacctgcaacttttgcccctttcaggaggcccacagggatcacagctcctgtggctgctagggatgggggcaggcactgatcctgcaaacctgaactagcatcccaccatcagcatcccattatccaaccgtggaccttgccagcttcctccactgctctctgcagccatcagctagagggacaagagttaaactggctttacaggaaacacacacagtgctggttaccttgaggtttagaaagcccctcctcacacaagtttattcaatcagtgccattagcatttatacatgcaggtgcatgtgtgtgcatatgtgtgtgcatatgtgtgtgcacgtgcatgcgccagctctcaccctgtacatcttatctattctccaaaagaccatgttaactctgatacagcgtccgcattccagcaagcttcacagcagaggaaataaagtcatatggaaaacacccagcacaaagctgactgtgtgaatgagtcaaaggc

SEQ ID NO: 19 - protein, 378 aa, Mus musculus
MRASFFWLLPLLLILASVAQGQPTRPKPGIRRKPKPRPTPRFPQAPEPAEPTDLPPPLPPGPPSVFPDCPRECYCPPDFPSALYCDSRNLRRVPVIPPRIHYLYLQNNFITELPLESFQNATGLRWVNLDNNRIRKVDQRVLGKLPSLAFLYMEKNQLEEVPSALPRNLEQLRLSQNLISRIPPGVFSKLENLLLLDLQHNRLSDGVFKADTFQGLKNLMQLNLAHNILRKMPPKVPQAIHQLYLDSNKIETIPNGYFKDFPNLAFIRMNYNKLSDRGLPKNSFDISNLLVLHLSHNKISNVPAISNKLEHLYLNNNSIEKINGTQICPNNLVAFHDFSSDLENVPHLRYLRLDGNFLKPPIPLDLMMCFRLLQSVVI

SEQ ID NO: 20 - DNA, 639 bp, Mus musculus
cacaggcaagactttggagagagcagactaggcataatggccaccttgccaccaacagccaacccttcccagcaacctctaaacctagaggatgaagatggaatcctggatgaatatgatcagtacagcctggcccatccctgtgtcgtcgggggaggtcggaaaggtcggaccaagagagaagctgctgccaataccaaccgccctagccctggcgggcatgagaggaagctgctgaccaagttccagaactctgaaaggaaaaaagcctggcgctgagacggagctggagataaggccagaccacagacaccacacccagcaatggatacaggacatcacacccagcaatggatacaggacatcacacccagcaatggatacaggaccttggagaaattaggagttgtaagcaggacctaggcctgcttgattctttcccacctaagtgaggttctggagagggagcccttccacccttccagacccagcaaaagggcaagatgggagcaagaagcagagggtagacgggcagagctaggaagacagcccccaaaagaactgtgggggaaataaatcggatgcccttgggtggcagcaacaataaatcgtacagcagtgacagcaaaaaaaaaaaaa

SEQ ID NO: 21 - protein, 80 aa, Mus musculus
MATLPPTANPSQQPLNLEDEDGILDEYDQYSLAHPCVVGGGRKGRTKREAAANTNRPSPGGHERKLLTKFQNSERKKAWR

SEQ ID NO: 22 - DNA, 4388 bp, Mus musculus
ggaagatctcatggaccgctatggaaagaatgacagccttaccctgacacagctgaagtccctgctcgaccacctgcatgtgggagtgggccgggataatgtttcccagcccaaggaaggacccaggaacctctccacgtgctttagctctggagacctctttgcggcgcacaacttgagcgagcgatctcagatcggggcgagtgagttccaggagttctgccccaccattctccagcagctggattcccaggcctgcacctcagaaaaccagaagtctgaggagaatgaacagacagaggaggggaagccaagcgccattgaagtatgggggtacggtttcctctgcgttaccgtcatctccctctgctccctcatgggggccagcgtggtgcccttcatgaagaagactttttacaagaggctcctgctctacttcatagccttggcgattggaaccctctactccaacgccctcttccagctcatcccagagtggaaactgttggctcagtttgaccaggtaaaccttgagctgcacattagccttggcctcaccatcctggtatccgtggtcaccatgaagcggctgcacccagcccttccaagctgcctcctgttggtgctgtttggtatatggagaactgccccccagactcatccctcagcactgcaacagcgagctggatggcaaggcgcctggcacggacgagaaggtcattgtcaactccatgtctgtgcaggacctgcaggcatcccagagtgcttgctactggctcaagggggtccgctactctgatatcgggaccttggcctggatgatcaccctgagcgatgggctccacaatttcatcgatggcctggctattggtgcctccttcactgtgtctgtcttccaaggcatcagcacgtcagtggccattctctgtgaggaattccctcatgagctgggagacttcgtcatcctgctcaatgctggcatgagcatccagcaggctctcttcttcaacttcctctctgcctgctgctgctatttgggtctggcctttggcatcctggctggcagccacttctctgcaaactggatttttgcactggctggaggaatgttcttgtatattgccctagccgatatgttccctgagatgaatgaagtctgccaggaggatgagaagaacgacagctttctggtcccctttgtcatccagaatcttggcctcctaaccggcttctccattatgctggtcctcacaatgtattcagggcagattcagatcgggtaggaccctgccattggggagccagtggcattggacatcgggctctgggcccccatctggtccccggcccgaggactcagcatccacgaagcatcatggaaaaggcagctctttaaaaactggcacagacttgtctgcctgcattcagatgtcatctgtttcaaatgctctgtcctaggaagaagctgccctgggaatctctaggtagtgcctcgaaccgttgtctcccgaccctttccactgatgattctggagctgaaacgccacatgtaggacacgcctcccttttccttctggccaccctcctccctttctcttggaagaagcactgagagatgtggaatcttttacaatgtaaaaatgaagccagtggtcatggtttggttagaagtatcagtgtggcttccagctttggggcctgtgattctaaatgtgtgtacccaggatttcaggtcggtccattttggcatgggttctcatgtttttacagagaagagggcagaagacaagactcctgtgtttttcagtctgttaactgttctctgaaaaggctgactttccgatgagtatggcaggcagaggggcaggggattgcctgagtgaggagggggtagaactagtgatggatgtcctgtctccttggtgctcggtttccaccaggatgctgcgtgcaggttgcttgcagcatctggagtcacataatcatccaggcgagccactgtgggcattctctggcgtggcaagaggtctgctaaatcagttgtttttgccctgatcctcacgccttcctattgctttctttttctagttaactttgtagatgcctcacggggagcacggtcagagcacatttaaaggtttttgcataggagggaaactgcacaaatcagtctcccctggtcaagacctctgccagtagaacctgactcatagaatcaggacacagttgtttatgcctttttgtgaccaaggtgattgggaatggagtcattgcaggccagacttaggacttgctaattgcagaaataatagttgaataccatgggactctggaccttgaggtcaattcttgaggtcaggactgcagacgtcattgctgccaatgggttttaaaggacaccatctagctaccacttcctccccggtcccagacaacaagattgaatactgaattgaatcgagtgtaaattgctttcatttggtccaggaaaacaaaacaaaacaaaaccagatgcttgacatttcacaccacaagccagcctcaggcgctgtgcagccccctcctcagaactctggcttccaggggagctaatctccaggttcactaagtgaattaatttattattatcatattgatacatggattccttagccactttggagagccagtctctcccgaagcctttcttagtggtgcccacagtcacagtccaggagccattgttcgcatgacttacagtactgaatcattgccaatccctgagtctttctgttcttaccacaggaaaactgtccattaaaagcagtgtgcatatatatatatatatatacacacacacacacacacacacatgtatgtgtgtgtgtgtgtgtgtgtgtgttcattcttgttcttcttggggaaacatgcttgaaaccaggaatcctgaaatcctgagaacacaactggggaaacagaaatttgctcagtttctctccctgctcttgcctcttgcctttgagacaaggcagcaggaagaggaaagttcagcaatcaaggtactagattggatgtcaggaccaggtcctggtaggcttagggtccagttttaccaaagaaccagttccttcaatgttagaagctaagctttatgttaccgtcatggttgttggtgtttgaaggcgagtctcatctctcctgttctatttctcctacaaatgctttaggaggtagcagaaattgacactcaaagtgtaagactgagcaggctgtgtgactcgtacctgtaatctcagcccctagggaggcagagtcagcaggctcaagttttataccagcctgggcttcatagtgaatagcaggccagtctgggctacatagcaagctcctgtgtcagcaagacaaaatgaagataaaaaaccgtaaaatttaagattgtaggtctgagggtgtggctcagtggtagcacgttttttgtccagtgtgtatgtgacaccctgaatgtcattcccagcaccaccacagccccccccccaaaggttgaaagattccactttacctagctcatgcattatatttttaactttaggagttcccctagctcctgtcctttaaatgcccttatgctggaatcggatggtggcttggtttgtttaaaagagcttaaaaagagtcttaaacatgagatagactgtctgccatgcacccttcctgtgaacttaagaactttgaggaaatcctggggcttcttcagggcggagggctggcatcagtcagacacaggtggggcgtgggagccaactgataatccattgctattggcaacagattcgccccatgagttgaaaatgtggccgttgaccttcttttgacttttaaatgttgaacttgctgttttaagcatctgtacatataagaggctgaaggggctacgggctgcttagcggacacttctcccctggccttactgcccatagcttctgttccctgttaacactagcaaggaaagtgcttgtcacacagaggagccctcagccaggccttggattctgtcattggaggacctcatttctgacctcaccttcagtcctccatccccgccctccaatacttagggtcaccagggggagcactctccggtacccttcacctgggttttaaatggcttctctctgtctggatcacctaggatccagttttagtgaaccctcttccaaagagatacagataagctggatgattttttgcataaagaaagaggattttactcatagttccctttacagttccatcacagtattttttttaaataactcaggtgttatgagaattagaaaataaaataatttatgtcatgtgaactgtaaatgttttatttgtaagattctataaataaagctatattctgt

SEQ ID NO: 23 - protein, 326 aa, Mus musculus
EDLMDRYGKNDSLTLTQLKSLLDHLHVGVGRDNVSQPKEGPRNLSTCFSSGDLFAAHNLSERSQIGASEFQEFCPTILQQLDSQACTSENQKSEENEQTEEGKPSAIEVWGYGFLCVTVISLCSLMGASVVPFMKKTFYKRLLLYFIALAIGTLYSNALFQLIPEDIGTLAWMITLSDGLHNFIDGLAIGASFTVSVFQGISTSVAILCEEFPHELGDFVILLNAGMSIQQALFFNFLSACCCYLGLAFGILAGSHFSANWIFALAGGMFLYIALADMFPEMNEVCQEDEKNDSFLVPFVIQNLGLLTGFSIMLVLTMYSGQIQIG

SEQ ID NO: 24 - DNA, 692 bp, Mus musculus
ctaaagaactttaaggaaatcctggggcttcttcagggcggaggggcggcatcagtcaaacacaggtggggcgtggaagcaaatgataaatccattgcaattggcaccagattcgccccatgagttgaaaaatgtggccggtgaccttcttttgactttaaaatgttgaactgactgttttaagcatctgtacatataagaggctgaaggggctacgggctgcttagcggacacttctcccctggccttactgcccatagcttctgttccctgttaacactagcaaggaaagtgcttgtcacacagaggagccctcagccaggccttggattctgtcattggaggacctcatttctgacctcaccttcagtcctccatccccgccctccaatacttagggtcaccagggggagcactctccggtacccttcacctgggttttaaatggcttctctctgtctggatcacctaggatccagttttagtgaaccctcttccaaagagatacagataagctggatgattttttgcataaagaaagaggattttactcatagttccctttacagttccatcacagtattttttttaaataactcaggtgttatgagaattagaaaataaaataatttatgtcatgtgaactgtaaatgttttatttgtaagattctataaataaagctatattctgt

SEQ ID NO: 25 - DNA, 2909 bp, Mus musculus
ctgagagatgtggaatcttttacaatgtaaaaatgaagccagtggtcatggtttggttagaagtatcagtgtggcttccagctttggggcctgtgattctaaatgtgtgtacccaggatttcaggtcggtccattttggcatgggttctcatgtttttacagagaagagggcagaagacaagactcctgtgtttttcagtctgttaactgttctctgaaaaggctgactttccgatgagtatggcaggcagaggggcaggggattgcctgagtgaggagggggtagaactagtgatggatgtcctgtctccttggtgctcggtttccaccaggatgctgcgtgcaggttgcttgcagcatctggagtcacataatcatccaggcgagccactgtgggcattctctggcgtggcaagaggtctgctaaatcagttgtttttgccctgatcctcacgccttcctattgctttctttttctagttaactttgtagatgcctcacggggagcacggtcagagcacatttaaaggtttttgcataggagggaaactgcacaaatcagtctcccctggtcaagacctctgccagtagaacctgactcatagaatcaggacacagttgtttatgcctttttgtgaccaaggtgattgggaatggagtcattgcaggccagacttaggacttgctaattgcagaaataatagttgaataccatgggactctggaccttgaggtcaattcttgaggtcaggactgcagacgtcattgctgccaatgggttttaaaggacaccatctagctaccacttcctccccggtcccagacaacaagattgaatactgaattgaatcgagtgtaaattgctttcatttggtccaggaaaacaaaacaaaacaaaaccagatgcttgacatttcacaccacaagccagcctcaggcgctgtgcagccccctcctcagaactctggcttccaggggagctaatctccaggttcactaagtgaattaatttattattatcatattgatacatggattccttagccactttggagagccagtctctcccgaagcctttcttagtggtgcccacagtcacagtccaggagccattgttcgcatgacttacagtactgaatcattgccaatccctgagtctttctgttcttaccacaggaaaactgtccattaaaagcagtgtgcatgtatatatatatatatatatatatatatatatgtgtatgtatacatatatatatatgcactcacatgtattcatatatatatatatatatatatatatatatatatatacacacacacacacacacacacatgtatgtgtgtgtgtgtgtgtgtgtgtgttcattcttgttcttcttggggaaacatgcttgaaaccaggaatcctgaaatcctgagaacacaactggggaaacagaaatttgctcagtttctctccctgctcttgcctcttgcctttgagacaaggcagcaggaagaggaaagttcagcaatcaaggtactagattggatgtcaggaccaggtcctggtaggcttagggtccagttttaccaaagaaccagttccttcaatgttagaagctaagctttatgttaccgtcatggttgttggtgtttgaaggcgagtctcatctctcctgttctatttctcctacaaatgctttaggaggtagcagaaattgacactcaaagtgtaagactgagcaggctgtgtgactcgtacctgtaatctcagcccctagggaggcagagtcagcaggctcaagttttataccagcctgggcttcatagtgaatagcaggccagtctgggctacatagcaagctcctgtgtcagcaagacaaaatgaagataaaaaaccgtaaaatttaagattgtaggtctgagggtgtggctcagtggtagcacgttttttgtccagtgtgtatgtgacaccctgaatgtcattcccagcaccaccacagccccccccccaaaggttgaaagattccactttacctagctcatgcattatatttttaactttaggagttcccctagctcctgtcctttaaatgcccttatgctggaatcggatggtggcttggtttgtttaaaagagcttaaaaagagtcttaaacatgagatagactgtctgccatgcacccttcctgtgaactcaagaactttgaggaaatcctggggcttcttcagggcggagggctggcatcagtcagacacaggtggggcgtgggagccaactgataatccattgctattggcaacagattcgccccatgagttgaaaatgtggccgttgaccttcttttgacttttaaatgttgaacttgctgttttaagcatctgtacatataagaggctgaaggggctacgggctgcttagcggacacttctcccctggccttactgcccatagcttctgttccctgttaacactagcaaggaaagtgcttgtcacacagaggagccctcagccaggccttggattctgtcattggaggacctcatttctgacctcaccttcagtcctccatccccgccctccaatacttagggtcaccagggggagcactctccggtacccttcacctgggttttaaatggcttctctctgtctggatcacctaggatccagttttagtgaaccctcttccaaagagatacagataagctggatgattttttgcataaagaaagaggattttactcatagttccctttacagttccatcacagtattttttttaaataactcaggtgttatgagaattagaaaataaaataatttatgtcatgtgaactgtaaatgttttatttgtaagattctataaataaagctatattctgtaaaaaaaaaaaaaaaaaaaaaaaaaaaaaaaaaaaaa

SEQ ID NO: 26 - DNA, 4927 bp, Mus musculus
atgcggcgggggccggacgtagagagggggcgcgtggctgttggcggggacgcacccactcagtagctgtgtcgcccgctgccttggggggggggccctggatagtgaggctgcgtgggcccgactgccggctggaggacttcagtgtgtctccaggctacttaatatccagagtggaaactgttggctcagtttgaccaggtaaaccttgagctgcacattagccttggcctcaccatcctggtatccgtggtcaccatgaagcggctgcacccagcccttccaagctgcctcctgttggtgctgtttggtatatggagaactgccccccagactcatgcctcgtctgctggcctgccgcccctcagtgccacctccttcctggaagatctcatggaccgctatggaaagaatgacagccttaccctgacacagctgaagtccctgctcgaccacctgcatgtgggagtgggccgggataatgtttcccagcccaaggaaggacccaggaacctctccacgtgctttagctctggagacctctttgcggcgcacaacttgagcgagcgatctcagatcggggcgagtgagttccaggagttctgccccaccattctccagcagctggattcccaggcctgcacctcagaaaaccagaagtctgaggagaatgaacagacagaggaggggaagccaagcgccattgaagtatgggggtacggtttcctctgcgttaccgtcatctccctctgctccctcatgggggccagcgtggtgcccttcatgaagaagactttttacaagaggctcctgctctacttcatagccttggcgattggaaccctctactccaacgccctcttccagctcatcccagaggcttttggcttcaaccctcaggacaattacgtctccaagtctgcagtggtgtttgggggtttctaccttttctttttcacagaaaagatcctgaagatgctcttgaagcagaaaaacgagcaccatcacgggcataaccattttacctccgagacacttccttccaagaaggaccaggaggagggtgtgaccgagaagctacagaacggggacctggatcacatgatccctcagcactgcaacagcgagctggatggcaaggcgcctggcacggacgagaaggtcattgtcaactccatgtctgtgcaggacctgcaggcatcccagagtgcttgctactggctcaagggggtccgctactctgatatcgggaccttggcctggatgatcaccctgagcgatgggctccacaatttcatcgatggcctggctattggtgcctccttcactgtgtctgtcttccaaggcatcagcacgtcagtggccattctctgtgaggaattccctcatgagctgggagacttcgtcatcctgctcaatgctggcatgagcatccagcaggctctcttcttcaacttcctctctgcctgctgctgctatttgggtctggcctttggcatcctggctggcagccacttctctgcaaactggatttttgcactggctggaggaatgttcttgtatattgccctagccgatatgttccctgagatgaatgaagtctgccaggaggatgagaagaacgacagctttctggtcccctttgtcatccagaatcttggcctcctaaccggcttctccattatgctggtcctcacaatgtattcagggcagattcagatcgggtaggaccctgccattggggagccagtggcattggacatcgggctctgggcccccatctggtccccggcccgaggactcagcatccacgaagcatcatggaaaaggcagctctttaaaaactggcacagacttgtctgcctgcattcagatgtcatctgtttcaaatgctctgtcctaggaagaagctgccctgggaatctctaggtagtgcctcgaaccgttgtctcccgaccctttccactgatgattctggagctgaaacgccacatgtaggacacgcctcccttttccttctggccaccctcctccctttctcttggaagaagcactgagagatgtggaatcttttacaatgtaaaaatgaagccagtggtcatggtttggttagaagtatcagtgtggcttccagctttggggcctgtgattctaaatgtgtgtacccaggatttcaggtcggtccattttggcatgggttctcatgtttttacagagaagagggcagaagacaagactcctgtgtttttcagtctgttaactgttctctgaaaaggctgactttccgatgagtatggcaggcagaggggcaggggattgcctgagtgaggagggggtagaactagtgatggatgtcctgtctccttggtgctcggtttccaccaggatgctgcgtgcaggttgcttgcagcatctggagtcacataatcatccaggcgagccactgtgggcattctctggcgtggcaagaggtctgctaaatcagttgtttttgccctgatcctcacgccttcctattgctttctttttctagttaactttgtagatgcctcacggggagcacggtcagagcacatttaaaggtttttgcataggagggaaactgcacaaatcagtctcccctggtcaagacctctgccagtagaacctgactcatagaatcaggacacagttgtttatgcctttttgtgaccaaggtgattgggaatggagtcattgcaggccagacttaggacttgctaattgcagaaataatagttgaataccatgggactctggaccttgaggtcaattcttgaggtcaggactgcagacgtcattgctgccaatgggttttaaaggacaccatctagctaccacttcctccccggtcccagacaacaagattgaatactgaattgaatcgagtgtaaattgctttcatttggtccaggaaaacaaaacaaaacaaaaccagatgcttgacatttcacaccacaagccagcctcaggcgctgtgcagccccctcctcagaactctggcttccaggggagctaatctccaggttcactaagtgaattaatttattattatcatattgatacatggattccttagccactttggagagccagtctctcccgaagcctttcttagtggtgcccacagtcacagtccaggagccattgttcgcatgacttacagtactgaatcattgccaatccctgagtctttctgttcttaccacaggaaaactgtccattaaaagcagtgtgcatatatatatatatatatatatatatatatatatatatatatatacatatatatatatgcactcacatgtattcatatatatatatatatatatatatatatatatatatacacacacacacacacacacacatgtatgtgtgtgtgtgtgtgtgtgtgtgttcattcttgttcttcttggggaaacatgcttgaaaccaggaatcctgaaatcctgagaacacaactggggaaacagaaatttgctcagtttctctccctgctcttgcctcttgcctttgagacaaggcagcaggaagaggaaagttcagcaatcaaggtactagattggatgtcaggaccaggtcctggtaggcttagggtccagttttaccaaagaaccagttccttcaatgttagaagctaagctttatgttaccgtcatggttgttggtgtttgaaggcgagtctcatctctcctgttctatttctcctacaaatgctttaggaggtagcagaaattgacactcaaagtgtaagactgagcaggctgtgtgactcgtacctgtaatctcagcccctagggaggcagagtcagcaggctcaagttttataccagcctgggcttcatagtgaatagcaggccagtctgggctacatagcaagctcctgtgtcagcaagacaaaatgaagataaaaaaccgtaaaatttaagattgtaggtctgagggtgtggctcagtggtagcacgttttttgtccagtgtgtatgtgacaccctgaatgtcattcccagcaccaccacagccccccccccaaaggttgaaagattccactttacctagctcatgcattatatttttaactttaggagttcccctagctcctgtcctttaaatgcccttatgctggaatcggatggtggcttggtttgtttaaaagagcttaaaaagagtcttaaacatgagatagactgtctgccatgcacccttcctgtgaactcaagaactttgaggaaatcctggggcttcttcagggcggagggctggcatcagtcagacacaggtggggcgtgggagccaactgataatccattgctattggcaacagattcgccccatgagttgaaaatgtggccgttgaccttcttttgacttttaaatgttgaacttgctgttttaagcatctgtacatataagaggctgaaggggctacgggctgcttagcggacacttctcccctggccttactgcccatagcttctgttccctgttaacactagcaaggaaagtgcttgtcacacagaggagccctcagccaggccttggattctgtcattggaggacctcatttctgacctcaccttcagtcctccatccccgccctccaatacttagggtcaccagggggagcactctccggtacccttcacctgggttttaaatggcttctctctgtctggatcacctaggatccagttttagtgaaccctcttccaaagagatacagataagctggatgattttttgcataaagaaagaggattttactcatagttccctttacagttccatcacagtattttttttaaataactcaggtgttatgagaattagaaaataaaataatttatgtcatgtgaactgtaaatgttttatttgtaagattctataaataaagctatattctgtaa

SEQ ID NO: 27 - protein, 489 aa, Mus musculus
MKRLHPALPSCLLLVLFGIWRTAPQTHASSAGLPPLSATSFLEDLMDRYGKNDSLTLTQLKSLLDHLHVGVGRDNVSQPKEGPRNLSTCFSSGDLFAAHNLSERSQIGASEFQEFCPTILQQLDSQACTSENQKSEENEQTEEGKPSAIEVWGYGFLCVTVISLCSLMGASVVPFMKKTFYKRLLLYFIALAIGTLYSNALFQLIPEAFGFNPQDNYVSKSAVVFGGFYLFFFTEKILKMLLKQKNEHHHGHNHFTSETLPSKKDQEEGVTEKLQNGDLDHMIPQHCNSELDGKAPGTDEKVIVNSMSVQDLQASQSACYWLKGVRYSDIGTLAWMITLSDGLHNFIDGLAIGASFTVSVFQGISTSVAILCEEFPHELGDFVILLNAGMSIQQALFFNFLSACCCYLGLAFGILAGSHFSANWIFALAGGMFLYIALADMFPEMNEVCQEDEKNDSFLVPFVIQNLGLLTGFSIMLVLTMYSGQIQIG

SEQ ID NO: 28 - DNA, 1555 bp, Mus musculus
gggtcacccactcgcccagactataggagcctcccgggacagtctttgagttgcacctttctgcagaactgactggttgaacccccgcagcgctcttaggatttgaagcgtcctgatcctggaggcttgcacgccgcgctctcccgactctgggacacattcgcccgaaccactggagtgtgcgggtgactgacatatcatctcatctcttcgactctccatgagctcatgaacctgggagcaggtccacggcaatggcgcggcctctgagcgacaggaccccgggccccctgctgctgggtggcccggctggggccccccctggcgggggagcgctgcttgggctgaggagccttctgcagggaaacagcaagcccaaagaaccggccagctgtctccagaaggaaaaggagcgcaaggcaactctgccctcagcccccgtcccgggacccggcctggaaacggcgggcccagccgatgccccgagtggggccgttagtggcggtgggtcccctcggaggcgctcagggcctgtggctggcccgagtctttttgcgccgctgctgtgggaacgcactttgcctttcggggacgtggaatacgtggacctggacgccttcttgctggagcacgggctaccgccgagcccgccgccccccgggggcctgtcgccggcaccctctccagcgcgcactcccgcgccctcccccgggcccggctcttgcagctcctcttccccccgctcctcgcccgggcacgcccccgcgcgggccactctgggagccgccggcggccaccgcgcaggcttgacatctagggacacacccagtcctgtggacccagacaccgtggaggtgctaatgacctttgaacctgatcccgctgatctcgccctgtcaagcattccaggccatgagacttttgaccctcggagacaccgcttctcagaggaggaactgaagcctcaaccaatcatgaagaaggcaaggaaagtccaggtgcctgaggaacagaaggatgagaagtactggagccggaggtacaagaacaatgaagcagccaagaggtcgagagatgcaagaagactcaaggagaaccagatatctgtgcgggctgccttcctggagaaggagaacgccctgttgcggcaggaggtggtggctgtgcggcaggagctgtcccactaccgtgctgtgctttcacgctaccaggcccagcatgggacactgtgaggccacctccaccctgccagggcagagtcctgttccttgctcagacttacacctgacttcctccttgtcccatggccagtggtctggccagctaggtgcccgaagaacgtcatgatgcagacaaatacatttatatttttaagaaaaagctagccttcccccacctcccttgtgggggtggggagggtcctgtgtgtgctcttagcatgttggggaacccatccatccaaccgcctccatcaacacaatcctgaataaatcttgagaacccgggagccagctgttgtggcggacaaagcagctactggctctgactcaaggct

SEQ ID NO: 29 - protein, 325 aa, Mus musculus
MARPLSDRTPGPLLLGGPAGAPPGGGALLGLRSLLQGNSKPKEPASCLQKEKERKATLPSAPVPGPGLETAGPADAPSGAVSGGGSPRRRSGPVAGPSLFAPLLWERTLPFGDVEYVDLDAFLLEHGLPPSPPPPGGLSPAPSPARTPAPSPGPGSCSSSSPRSSPGHAPARATLGAAGGHRAGLTSRDTPSPVDPDTVEVLMTFEPDPADLALSSIPGHETFDPRRHRFSEEELKPQPIMKKARKVQVPEEQKDEKYWSRRYKNNEAAKRSRDARRLKENQISVRAAFLEKENALLRQEVVAVRQELSHYRAVLSRYQAQHGTL

SEQ ID NO: 30 - DNA, 336 bp, Mus musculus
ccactccacttttcatcccaccttctctatcaaatcacctgaagacttctataagtaccagaattctctgcggactaccttccaggagaaggaacacgccctaatacgtctggaactggagactgtgcggcaggagctatcccactaccgtactgtgctttcacgctaccaggcccagcatgggacactgtgagcccacctccaccctgccagggcagagtcctgttccttgctcagacttacacctgacttcctccttgtcccatggccagtggtctggccagccaggtgcccgaagaacgtcatgatgcagacaaataaattaatatttttaac

SEQ ID NO: 31 - DNA, 1749 bp, Mus musculus
gggacttgggtccccaaatgcgaaaggattattcactgagaggcagtattcttctctaagacaagtttcctcatgttcttggagccaagactagaaacttagaacaccttagttaactggagagtactatctccagagtctgggtccagaattttgggaaacgagatgggactggacttcaaggacaccaaaaatgggagcgagcaggccagagcggggtactacgttcccggatcctacacacgcacacaccccattccccaagtggatggtgttgcatcctgcctcccagtcttgcagaagagaatatcgggatccctcttctggcttctacagaggagctttcccatgtccctgtgttggggacctaggatctcagaactgtgggaatctggatggcaaagagcttggcaggccggttctcccacgatcctcccccatagcgcgggatgggtgggtagaatcattgtagatgttggagctgagaccaaaaggaacaagaagggaggcgaccccaatcaagacaaggagtctcgatgtgggacgcctgggtacacctgtccctgatccgacctccaggcaaaaaccagtgctgcacattccctcgccacgtgagtccgccttcctagctgcgcgcacgcgctctcacgcgcgaggaggcggggccgggaacgtgcgggtgcttggttggggaggaggggaaaggggaagctgtaggccacacgtgatgcggccctgaactggtgtcctcggctgacccgggcttatttgttcttaaagacacaggactcaaccttttttagccaggctcttgaaacttccatcactcctaggagtgctggtctaacaggtctaagctctgagaaagggttcagtaagtaggactcggacacagcagtgggaacaaaacactgagtctgaagtttagaggttttagaagattcacgggatatttaaggccagtcatttctgccttacaatgatagaattgccttccggtggcaaagcatctttgtcacagggtttatgcctgacaggatttgtgttaagacagcagaaaaaacctgttctgtggtggataagcttggcggagcggtgctctgagaacgcagacctcgaactactcacacattcaagcgataacgtatttctctaggcttgacatctagggacacacccagtcctgtggacccagacaccgtggaggtgctaatgacctttgaacctgatcccgctgatctcgccctgtcaagcattccaggccatgagacttttgaccctcggagacaccgcttctcagaggaggaactgaagcctcaaccaatcatgaagaaggcaaggaaagtccaggtgcctgaggaacagaaggatgagaagtactggagccggaggtacaagaacaatgaagcagccaagaggtcgagagatgcaagaagactcaaggagaaccagatatctgtgcgggctgccttcctggagaaggaaaacgccctgttgcggcaggaggtggtggctgtgcggcaggagctgtcccactaccgtgctgtgctttcacgctaccaggcccagcatgggacactgtgaggccacctccaccctgccagggcagagtcctgttccttgctcagacttacacctgacttcctccttgtcccatggccagtggtctggccagctaggtgcccgaagaacgtcatgatgcagacaaatacatttatatttttaagaaaaaaaaaaaaaaaaaaaaaa

SEQ ID NO: 32 - DNA, 1638 bp, Mus musculus
gggtgcagattgcaaagctcctttctttgcgagaagtgcaaaattggctagagccagagactcgcccacctggtacagaaggagcgcgcgcctgtgtcccttggggacccacagttgcaaagagacagctgcttgatttggtcacccactcgcccagactataggagcctcccgggacactcttgagttgcacctttctgcagagcagactggttgacccccgcagcgctcttaggatttgaagcgtcctgatcctggaggtttgcacgccgcgctctcccgactctgggacacattcgcccgaaccactggagtgtgcgggtgactgacatatcatctcatctcttcgactctccatgagctcatgaacctgggagcaggtccacggcaatggcgcggcctctgagcgacaggaccccgggccccctgctgctgggtggcccggctggggccccccctggcgggggagcgctgcttgggctgaggagccttctgcagggaaacagcaagcccaaagaaccggccagctgtctcctgaaggaaaaggagcgcaaggcaactctgcccacagcccccgtcccgggacccggcctggaaacggcgggcccagccgatgccccgagtggggccgttagtgggggtgggtcccctcgggggcgctcagggcctgtggctggcccgagtctttttgcgccgctgctgtgggaacgcacttttcctttcggggacgtggaatacgtggacctggacgccttcttgctggagcacgggctaccgccgagcccgccgccccccgggggcctgtcgccggcaccctctccagcgcgcactcccgcgccctcccccgggcccggctcttgcagctcctcttccccccgctcctcgcccgggcacgcccccgcgcgggccactctgggagccgccggcggccaccgcgcaggcttgacatctagggacacacccagtcctgtggacccagacaccgtggaggtgctaatgacctttgaacctgatcccgctgatctcgccctgtcaagcattccaggccatgagacttttgaccctcggagacaccgcttctcagaggaggaactgaagcctcaaccaatcatgaagaaggcaaggaaagtccaggtgcctgaggaacagaaggatgagaagtactggagccggaggtacaagaacaatgaagcagccaagaggtcgagagatgcaagaagactcaaggagaaccagatatctgtgagggctgccttcctggagaaggaaaacgccctgttgcggcaggaggtggtggctgtgcggcaggagctgtcccactaccgtgctgtgctttcacgctaccaggcccagcatgggacactgtgaggcacctccaccctgccagggcagagtcctgttccttgctcagacttacacctgacttcctccttgtcccatggccagtggtctggccagctaggtgcccgaagaacgtcatgatgcagacaaatacatttatatttttaagaaaaagctagccttcccccacctcccttgtgggggtggggagggtcctgtgtgtgctcttagcatgttggggaacccatccatccaaccgcctccatcaacacaatcctgaataaatcttgagaaccc

SEQ ID NO: 33 - protein, 325 aa, Mus musculus
MARPLSDRTPGPLLLGGPAGAPPGGGALLGLRSLLQGNSKPKEPASCLLKEKERKATLPTAPVPGPGLETAGPADAPSGAVSGGGSPRGRSGPVAGPSLFAPLLWERTFPFGDVEYVDLDAFLLEHGLPPSPPPPGGLSPAPSPARTPAPSPGPGSCSSSSPRSSPGHAPARATLGAAGGHRAGLTSRDTPSPVDPDTVEVLMTFEPDPADLALSSIPGHETFDPRRHRFSEEELKPQPIMKKARKVQVPEEQKDEKYWSRRYKNNEAAKRSRDARRLKENQISVRAAFLEKENALLRQEVVAVRQELSHYRAVLSRYQAQHGTL

SEQ ID NO: 34 - DNA, 2719 bp, Mus musculus
gaaaggctctgtagctctgcccttgagcacagttgcagccactgaggggagatgccatgtcctgcaccttcacagccctgctccgtcttggactgactctgagcctctggatcccagtgctgacagggtccctccctaagcctatcctcagagtacagccagactctgtggtctccaggtggactaaggtgactttcttttgtgaggagacaattggagccaatgagtaccgcctctataaagatggaaagctatataaaactgtaacaaagaacaaacagaagccagcaaacaaggctgaattctcactctcaaatgtagacctgagaaatgcaggtcaatatcgatgttcctacagcacccagtataaatcatcaggctacagtgaccccctggagctggtggtgacaggagactactggacacccagccttttagcccaagccagccctgtggtaacttcaggagggtatgtcaccctccagtgtgagtcctggcacaacgatcacaagttcattctgactgtagaaggaccacagaagctctcgtggacacaagactcacagtataattactctacaaggaagtaccacgccctgttctctgtgggccctgtgacccccaaccagagatggatatgcagatgttacagttatgacaggaacagaccatatgtgtggtcacctccaagtgaatccgtggagctcctggtctcaggtaatctccaaaaaccaaccatcaaggctgaaccaggtcctgtgatcgcctccaaaagagcaatgaccatctggtgtcaggggaacctggatgcagaagtatattttctgcataatgagggaagccaaaaaacacaaagcacacagaccctacagcagcctgggaacaagggcaagttcttcatcccttctatgacaagacaacatgcagggcaatatcgctgttattgttacggctcagctggttggtcacagcccagtgacaccctggagctggtggtgacaggaatctatgaacactataaacccaggctgtcagtactgcccagccctgtggtgacagcaggaggaaacatgacactccactgtgcctcagactttcactacgataaattcattctcaccaaggaagataagaaattcggcaactcactggacacagagcatatatcttctagtagacagtaccgagccctgtttattataggacccacaaccccaacccatacagggacattcagatgttatggttacttcaagaatgccccacagctgtggtcagtacctagtgatctccaacaaatactcatctcagggctgtccaagaagccctctctgctgactcaccaaggccatatcctggaccctggaatgaccctcaccctgcagtgttactctgacatcaactatgacagatttgctctgcacaaggtggggggagctgacatcatgcagcactctagccagcagactgacactggcttctctgtggccaacttcacactgggctatgtgagtagctccactggaggccaatacagatgctatggtgcacacaacctttcctctgagtggtcagcctccagtgagcccctggacatcctgatcacaggacagctccctctcactccttccctctcagtgaagcctaaccacacagtgcactcaggagagaccgtgagcctgctgtgttggtcaatggactctgtggatactttcattctgtccaaggagggatcagcccagcaacccctacgactaaaatcaaagtcccatgatcagcagtcccaggcagaattctccatgagtgctgtgacctcccatctctcaggcacctacaggtgctatggtgctcaaaactcatctttctacctcttgtcatctgccagtgcccctgtggagctcacagtctcaggacccatcgaaacctctaccccgccacccacaatgtccatgccactaggtggactgcatatgtacctgaaggctctcattggagtgtctgtggccttcatcctgttcctcttcatcctcatcttcattcttctccgacgaagacatcggggaaaattcaggaaagatgtccagaaagagaaagacttgcaactttcttcaggagctgaagagcccataaccaggaaaggagaactccagaagaggcccaacccagctgctgccacccaggaagaaagcctatatgcttcagtggaggacatgcaaactgaggatggagtggagctgaacagctggacaccacctgaggaagatccccagggagagacttatgcccaggtgaaaccctccaggctcaggaaggcaggacatgtctcaccttctgtcatgtcaagggaacaactgaacacagaatatgaacaagcagaagagggccaaggagcaaacaatcaggctgccgaatctggggagtcccaggatgtgacctatgcccagctgtgcagcaggacactcagacagggggcagctgcatctcctctctcccaggcaggggaagccccagaggagcccagtgtatatgctactctggcggctgctcgtccagaggctgttcccaaggatgtggagcaatgaccccctgcctgccaggatgcctagcagagacctccaagggactctgggaacttttggaaacgtgactgcactttaagtaacatcagagtttgtaaataaagctagagatttctcaataaaaaaaaaaaaaaaaaaaa

SEQ ID NO: 35 - protein, 841 aa, Mus musculus
MSCTFTALLRLGLTLSLWIPVLTGSLPKPILRVQPDSVVSRWTKVTFFCEETIGANEYRLYKDGKLYKTVTKNKQKPANKAEFSLSNVDLRNAGQYRCSYSTQYKSSGYSDPLELVVTGDYWTPSLLAQASPVVTSGGYVTLQCESWHNDHKFILTVEGPQKLSWTQDSQYNYSTRKYHALFSVGPVTPNQRWICRCYSYDRNRPYVWSPPSESVELLVSGNLQKPTIKAEPGPVIASKRAMTIWCQGNLDAEVYFLHNEGSQKTQSTQTLQQPGNKGKFFIPSMTRQHAGQYRCYCYGSAGWSQPSDTLELVVTGIYEHYKPRLSVLPSPVVTAGGNMTLHCASDFHYDKFILTKEDKKFGNSLDTEHISSSRQYRALFIIGPTTPTHTGTFRCYGYFKNAPQLWSVPSDLQQILISGLSKKPSLLTHQGHILDPGMTLTLQCYSDINYDRFALHKVGGADIMQHSSQQTDTGFSVANFTLGYVSSSTGGQYRCYGAHNLSSEWSASSEPLDILITGQLPLTPSLSVKPNHTVHSGETVSLLCWSMDSVDTFILSKEGSAQQPLRLKSKSHDQQSQAEFSMSAVTSHLSGTYRCYGAQNSSFYLLSSASAPVELTVSGPIETSTPPPTMSMPLGGLHMYLKALIGVSVAFILFLFILIFILLRRRHRGKFRKDVQKEKDLQLSSGAEEPITRKGELQKRPNPAAATQEESLYASVEDMQTEDGVELNSWTPPEEDPQGETYAQVKPSRLRKAGHVSPSVMSREQLNTEYEQAEEGQGANNQAAESGESQDVTYAQLCSRTLRQGAAASPLSQAGEAPEEPSVYATLAAARPEAVPKDVEQ

SEQ ID NO: 36 - DNA, 3807 bp, Mus musculus
gaaaggctctgtagctcttccctcgagcacagttgcagccactgaggggagatgccatgtcctgcaccttcacagcccggctctgccttggactgactctgagcctctggatcccagtgctgacagggtccctccctaagcctatcctcagagtacagccacactctgtggtctccagaaggactaaggtgaccttcttgtgtgaggagacaattggagccaatgagtaccacctctataaagatggaaagctatataaaaccgtaacaaagaacaaacagaagccagcaaacaaggctgaattctcactctcaaatgtagacctgagtaatgcaggtcaatatcgatgttcctacaacacccaggatgaatcatcaggctacagtgaccccctggagctggtggtgacaggagactactggacacccagcctttcagcccaggccagccctgtggtaacttcaggagggtatgtcaccctccagtgtgagtcctggcacaacaatcacaggttcattctgactgtagaaggaccacagaagctctcatggatgcaagactcacaatataacaactctacaaggaagtaccacgccctgttctctgtgggccctgtgacccccaaccagcgatggatattcagatgttacagttatgacaggaacagaccatatgtgtggtcacctccaagtgaatccgtggagctcctggtctcaggtaatctccaaaaaccaaccatcaaggctgaaccaggatctgtgatcacctccaaaagagcaatgaccatctggtgtcaggggaacctggatgcagaagtatattttctgcataatgagaaaagccaaaaaacacagagcacacagaccctacaggagcctgggaacaagggcaagttcttcatcccttctgtgacactacaacatgcagggcaatatcgctgttattgttacggctcagctggttggtcacagcccagtgacaccctggagctggtggtgacaggaatctatgaacactataaacccaggctgtcagtactgcccagccctgtggtgacagcaggaggaaacatgacactccactgtgcctcagactttcactacgataaattcattctcaccaaggaagataagaaattcggcaactcactggacacagagcatatatcttctagtagacagtaccgagccctgtttattataggacccacaaccccaacccatacagggacattcagatgttatggttacttcaagaatgccccacagctgtggtcagtacctagtgatctccaacaaatactcatctcagggctgtccaagaagccctctctgctgactcaccaaggccatatcctggaccctggaatgaccctcaccctgcagtgtttctctgacatcaactatgacagatttgctctgcacaaggtggggggagctgacatcatgcagcactctagccagcagactgacactggcttctctgtggccaacttcacactgggctatgtgagtagctccactggaggccaatacagatgctatggtgcacacaacctctcctctgagtggtcagcctccagtgagcccctggacatcctgatcacaggacagctccctctcactccttccctctcagtgcagcctaaccacacagtgcactcaggagagaccgtgagcctgctgtgttggtcaatggactctgtggatactttcattctgtccaaggagggatcagcccagcaacccctgcgactaaaatcaaagtcccatgatcagcagtcccaggcagaattctccatgagtgctgtgacctcccatctctcaggcacctacaggtgctatggtgctcaaaactcatctttctacctcttgtcatctgccagtgcccctgtggagctcacagtctcaggacccatcgaaacctctaccccgccacccacaatgtccatgccactaggtggactgcatatgtacctgaaggctctcattggagtgtctgtggccttcatcctgttcctcttcatcctcatcttcattcttctccgacgaagacatcggggaaaattcaggaaagatgtccagaaagagaaagacttgcaactttcttcaggagctgaagagcccataaccaggaaaggagaactccagaagaggcccaacccagctgctgccacccaggaagaaagcctatatgcttcagtggaggacatgcaaactgaggatggagtggagctgaacagctggacaccacctgaggaagatccccagggagagacttatgcccaggtgaaaccctccaggctcaggaaggcaggacatgtctcaccttctgtcatgtcaagggaacaactgaacacagaatatgaacaagcagaagagggccaaggagcaaacaatcaggctgccgaatctggggagtcccaggatgtgacctatgcccagctgtgcagcaggacactcagacagggggcagctgcatctcctctctcccaggcaggggaagccccagaggagcccagtgtatatgctactctggcggctgctcgtccagaggctgttcccaaggatgtggagcaatgaccccctgcctgccaggatgcctagcagagacctccaagggactctgggaacttttggaaacgtgactgcactttaagtaacatcagagtttgtaaataaagctagagatttctcaataatcaagtgaaatgagaaatgaaatggaagggaaggttttacattgagtgctaactttaatgatatttctcaacaaagctaggaaatgagaaaatttacaggcactgttgcacagccccacaattccaacccacaggaggctgacgaggggaatttgttttgtggccatggtgagttatctagtgaatttcatgccaacctgggctacagagtgttttaaacattagccaccaaaggccagggtagaacacacctgaaatcccagcattttagaggagtggaaaggagggagggtcaagaggtcaaggtcatcttcagctacatagcctaggagtaagaggccagcctggaacacactagaccctttctaaaaatgaatcaataggccaagcttggaattgcatgccttccatctcagaactaaggaggtagagccaggcaaatcttttggacttagaacttttgagctcatcagtgtcaggttattttgttatggatatatatatatatatatatatattttttttttttttggtttttcgagacagggtttctctgtatagctctggctgtcctggaactcactttgtagaccaggctggcctcgaactcagaaatccgcctgcctctgcctcccaagtgctgggattaaaaagacgtgcgccaccacgcccggctggatatattttatttatgtgtagtatgtatgtatgtatgtatatgtgtttgctcagtgagatggctcagtaggtaaagaaaggcacttgccaccaggactgttatactaagttcaattatcagagaaacagtggaaggagaaaactgactgggagaatttttttctcacctccacctaagtcctgggtgtccttcccacacccaataggtaaataaaacaattaaaaagtagacaaaaggctggggagatggctcagcagtttagagcactgactgctctttcagaggtcctgagttcaattcccagcaaccacacagaggctcacaaccatctgtaataggatcgaatgccctcttctggtgtgtctgaagacagctacagtatattcatatacataaaataaacaaataaaaattttttaaaaagtag

SEQ ID NO: 37 - protein, 841 aa, Mus musculus
MSCTFTARLCLGLTLSLWIPVLTGSLPKPILRVQPHSVVSRRTKVTFLCEETIGANEYHLYKDGKLYKTVTKNKQKPANKAEFSLSNVDLSNAGQYRCSYNTQDESSGYSDPLELVVTGDYWTPSLSAQASPVVTSGGYVTLQCESWHNNHRFILTVEGPQKLSWMQDSQYNNSTRKYHALFSVGPVTPNQRWIFRCYSYDRNRPYVWSPPSESVELLVSGNLQKPTIKAEPGSVITSKRAMTIWCQGNLDAEVYFLHNEKSQKTQSTQTLQEPGNKGKFFIPSVTLQHAGQYRCYCYGSAGWSQPSDTLELVVTGIYEHYKPRLSVLPSPVVTAGGNMTLHCASDFHYDKFILTKEDKKFGNSLDTEHISSSRQYRALFIIGPTTPTHTGTFRCYGYFKNAPQLWSVPSDLQQILISGLSKKPSLLTHQGHILDPGMTLTLQCFSDINYDRFALHKVGGADIMQHSSQQTDTGFSVANFTLGYVSSSTGGQYRCYGAHNLSSEWSASSEPLDILITGQLPLTPSLSVQPNHTVHSGETVSLLCWSMDSVDTFILSKEGSAQQPLRLKSKSHDQQSQAEFSMSAVTSHLSGTYRCYGAQNSSFYLLSSASAPVELTVSGPIETSTPPPTMSMPLGGLHMYLKALIGVSVAFILFLFILIFILLRRRHRGKFRKDVQKEKDLQLSSGAEEPITRKGELQKRPNPAAATQEESLYASVEDMQTEDGVELNSWTPPEEDPQGETYAQVKPSRLRKAGHVSPSVMSREQLNTEYEQAEEGQGANNQAAESGESQDVTYAQLCSRTLRQGAAASPLSQAGEAPEEPSVYATLAAARPEAVPKDVEQ

SEQ ID NO: 38 - DNA, 1353 bp, Mus musculus
catatcctggaccctggaatgaccctaaccctgcagtgtttctctgacatcaactatgacagatttgctctgcacaaggtggggggagctgacatcatgcagcactctagccagcagactgacactggcttctctgtggccaacttcacactgggctatgtgagtagctccactggaggccaatacagatgctatggtgcacacaacctctccttctgagtggtcagcctccagtgagcccctggacatcctgatcacaggacagctccctctcactccttccctctcagtgcagcctaaccacacagtgcactcaggagagaccgtgagcctgctgtgttggtcaatggactctgtggatactttcattctgtccaaggagggatcagcccagcaacccctgcgactaaaatcaaagtcccatgatcagcagtcccaggcagaattctccatgagtgctgtgacctcccatctctcaggcacctacaggtgctatggagctcaagactcatctttctacctcttgtcatctgccagtgcccctgtggagctcacagtctcaggacccatcgaaacctctaccccgccacccacaatgtccatgccactaggtggactgcatatgtacctgaaggctctcattggagtgtctgtggccttcatcctgttcctcttcatcttcatcttcattcttcttcgacgaagacatcggggaaaattcaggaaagatgtccagaaagagaaagacttgcaactttcttcaggagctgaagagcccataaccaggaaaggagaactccagaagaggcccaacccagctgctgccacccaggaagaaagcctatatgcttcagtggaggacatgcaaactgaggatggagtggagctgaacagctggacaccacctgaggaagatccccagggagagacttatgcccaggtgaaaccctccaggctcaggaaggcaggacatgtctcaccttctgtcatgtcaagggaacaactgaacacagaatatgaacaagcagaagagggccaaggagcaaacaatcaggctgccgaatctggggagtcccaggatgtgacctatgcccagctgtgcagcaggacactcagacagggggcagctgcatctcctctctcccaggcaggggaagccccagaggagcccagtgtatatgctactctggcggctgctcgtccagaggctgttcccaaggacatggagcaatgaccccctgcctgccaggatgcctagcagagacctccaagggactctgggaacttttggaaacgtgactgcactttaagtaacatcagagtttggaaataaagctagagatttctcaataa

SEQ ID NO: 39 - DNA, 1972 bp, Mus musculus
gagtctgggttggactggctgctgtggagtttgtgacatactaggtgacacccttggagtcacttctcttcaactccagcttagaagtgcctgcctggctcagggtctgcactgcagcctactccttgcttcagggcctgactgcaacgccaaagcctatcctatagcggcgcgccagcagccactcaaaccagccacagctccccggcaaccgaaccatgaacaccgaaatgtatcagacccccatggaggtggcggtctatcagctgcacaatttctccatctccttcttttcttctctgcttggaggggatgtggtttccgttaaactggataacagtgcctccggagccagtgtggtggccctagacaacaagattgagcaggccatggacctcgtgaagaaccacctgatgtacgctgtgagagaggaggtggaggtcctaaaggagcagattcgtgagctgcttgagaagaactcccagctggagcgcgagaacaccctcctgaagacgctggcaagccccgagcaactggaaaagttccagtcccggctgagccctgaagagccagcacctgaagccccagaaaccccggaaaccccggaagcccctggtggttctgcggtgtaagtggctctgtccttagggtgggcagagccacatcttgttctacctagttctttccagtttgtttttggctccccaagcgtcatctcatgtggagaactttacacctaacatagctggtgccaagagatgtcccaaggacatgcccatctgggtccactccagtgacagacccctgacaaagagcaggtctctggagactaagttgcatggggcctagtaacaccaagccagtgagcctgtcgtgtcaccgggccctgggggctcccagggcctgggcaacttagttacagctgaccaaggagaaagtagttttgagatgtgatgccagtgtgctccagaaagtgtaaggggtctgtttttcatttccatggacatcttccacagcttcacctgacaatgactgttcctatgaagaagccacttgtgttctaagcagaagcaacctctctcttcttctctgtcttttccaggcaggggcagagatgggagagattgagccaaatgagccttctgttggttaatactgtataatgcatggctttgtgcacagcccagtgtggggttacagctttgggatgactgcttataaagttctgtttggttagtattggcatcgtttttctatatagccataatgcgtatatatacccatagggctagatctatatcttagggtagtgatgtatacatatacacatacacctacatgttgaagggcctaaccagctttgggagtactgactggtctcttatctcttaaagctaagtttttgactgtgctaatttaccaaattgatccagtttgtcctttagattaaataagactcgatatgagggagggaggggagaccagcctcacaatgcggccacagatgccttgctgctgcagtcctccctgatctgtccactgaagacatgaagtcctcttttgaatgccaaacccaccattcattggtgctgactacatagaatggggttgagagaagatcagtttggacttcacatttttgttttaagttttaggttgtttttttttggttttgtttgtttgtttgtttgtttgtttttgttttttgtttttcttttttttaagttcttgtgggaaactttggggttaatcaaaggatgtagtcctgtggtagaccagaggagtaactagttttgatccctttggggtgtggaaaatgtacccaggaagcttgtgtaaggaggttctgtgacagtgaacactttccactttctgacacctcatcctgctgtacgactccaggatttggatttggatttttcaaatgtagcttgaaatttcaataaactttgctcctttttctaaaaataaa

SEQ ID NO: 40 - protein, 137 aa, Mus musculus
MNTEMYQTPMEVAVYQLHNFSISFFSSLLGGDVVSVKLDNSASGASVVALDNKIEQAMDLVKNHLMYAVREEVEVLKEQIRELLEKNSQLERENTLLKTLASPEQLEKFQSRLSPEEPAPEAPETPETPEAPGGSAV

SEQ ID NO: 41 - DNA, 1769 bp, Mus musculus
ggagacataaatgccgactgtgccgagaggttgccagctgccaagtttgctgtgcttgctgcctctgcgagtccagaaagcccgggcactctctggcgctgagacttttgctcagcgccttccaacctcctcccgagctcttcccggctgggcctgtggcttcgaagttttttgttttgttttgttttgtttttcatcttttcacaacccacaaaaaaacccactagctgctgaggctccaacgagatcaagatgtggaccgtgccagtgttgttctgggttttggggagcgtttggttctgggactctgcgcagggagggactataggcgtgaatgaagatgatattgtgaccccaggtacaggagacggcatggtgcccccaggtatagaagacaaaataacaaccacaggtgctactggagggcttaatgaatctactggcaaggcacctctggtaccaacgcagagagagcgtgggacgaagcctcccttagaggaactgtccacctcagcaacctcagaccatgatcacagagaacacgagagtacaaccactgtcaaagtggtgactagccactctgtggacaagaaaacaagtcaccccaatagagataatgcaggggatgaaacgcagacaacagataagaaagatggcttgccagtagtcaccctggttggaatcatagttggcgtcttgttagccattggcttcgtcggagggatcttcattgttgttatgaagaagatttctggaaggttctcgccctaaagagctaaacagaacaggttgttctcccaacacatctgaaaataagagagcttccaacttgccctgttccccatcctcttcctgtggaggaagatgacccatggcgtgcccacccaccccacccacagccatggtgacccctccgcttggccagcagtaccaaaggaaagatacaggacaagccacagcccctcaaagcatctgcctttggaaaactaaatttttaacataaatgttatgatcgatgattcaaaagacaacatgcttagaaaatggagcaaagccaagacagtatcgccagctttagcaactgtaaccatgggttcaccctggccagtccctattactgttaagaggcatagagtctggaaatgttacatcacagaggcatgggtccttttgcagttgccaacttgtaactgcacttgatacatacacattccagcccagtcctaagcatccactgtgccttcagttccgggaagacactgcttttttttttttttttttttttacaagtctccaaaccatctctaagcctccgatgagttgaggagccacgtcctcatctccctaggactcaagccctcagatcagctgcatctttctggataatagagacctcatcctggatgctgagaacactgttggatgtcacaagatgctaaaaggctcagccgctgtagaaccaagaacatttcagtagaagtgactcatgttggctttagtataggaagtcagaccgaccagtttctaacacctgccttctgcttctcaggacagacagggaaagcaaaaataatcttgtataatcttaactgcttttatggggtggatgtaaaggtttgcggttaatagaagatatttccagtcttcgtgacacggggactcagtgttgctgggacagagctgtagtgtcttggtcgtctgtgttggtacccaatacagtgtagacatcttttcaaataaaacctgattgtgtccaagaatgaggccaa

SEQ ID NO: 42 - protein, 172 aa, Mus musculus
MWTVPVLFWVLGSVWFWDSAQGGTIGVNEDDIVTPGTGDGMVPPGIEDKITTTGATGGLNESTGKAPLVPTQRERGTKPPLEELSTSATSDHDHREHESTTTVKVVTSHSVDKKTSHPNRDNAGDETQTTDKKDGLPVVTLVGIIVGVLLAIGFVGGIFIVVMKKISGRFSP

SEQ ID NO: 43 - DNA, 3497 bp, Mus musculus
ccggcggcggtgtccggcgcgcggctgagcgaccgagcgtgcggacggagcggcggcctgctgggcgggctgagcggcgcgcgcggcggcggagagacgcggagcgagggacgcggcggcggcggacgcggcgacaggtcttctacttacaaaggacaatgactactgatgagggcaccagtaacaatggagagaacccagcagccaccatgactgagcagggtgaagatatcactacgaagaaagacagaggagtattaaagattgtcaaaagagtggggactagtgacgaggccccaatgtttggtgacaaagtttatgtccactacaaagggatgttgtcagatggaaagaagtttgattccagtcatgacagaaagaagccatttgcctttagccttggccaaggccaggttatcaaagcctgggacattggggtgtctactatgaagaaaggcgagatctgccatttattatgtaaaccagaatatgcttatggctcggctggccacctccaaaaaattccatcaaatgcaactctcttttttgagattgagctccttgatttcaaaggtgaggatttatttgaagattcaggcgttatccgtagaatcaaacggaaaggcgagggatactcaaacccaaacgaaggagcaacggtaaaagtccacctggaaggctgctgtggtggaaggacatttgattgccgagatgtggtgttcgttgttggggaaggagaagaccacgacattccgattgggatcgacaaagccctggtgaagatgcagagagaagaacagtgtattctatatcttggaccacgctatggttttggagaagccgggaagcctaagtttggcattgaccccaatgctgagcttatgtacgaggtcacccttaagagcttcgagaaggccaaagaatcttgggagatggacaccaaagaaaagctgacgcaggctgccatcgtgaaagagaagggaactgtgtacttcaagggaggcaagtacacgcaggccgtgattcagtacaggaagatagtgtcctggctggagatggaatacggcctgtcagagaaggagtccaaagcctcagagtcgttcctcctcgcagccttcctgaacctggccatgtgctacctgaagctccgagagtacaacaaagccgtggagtgctgcgacaaggcccttggactggacagtgccaatgagaaaggcttgtacagaaggggcgaggcccagctgctcatgaatgactttgagtcggccaagggcgacttcgagaaggtgttggcagtcaatcctcagaacagggccgctcgcctgcagatctccatgtgccagaggaaggcgaaggagcacaacgagcgggaccgcagggtgtacgccaacatgttcaagaagttcgcagagcgggacgcaaaggaggaagccagcaaagctgggagcaagaaggctgtagaaggagccgctggcaaacaacacgagagtcaggccatggaagaaggaaaggccaaaggccatgtatgacgctgcgccacggagggaagagagtcctaatgaactcggccctcctcgctgggctcgcctccaactcaggactgaacagtgtttagtgtaaggtttgttacagtctctgtgattctggaagcaaatggcataccagtagcttcccaaatgaccacctgctgctgcgggggggtgggggtgggggacatgccaggaaacagcagagaaggccgctggtgtgaagagaccaggccagcagctcagtccagcccatttcagtttgtcacctttcagtgtccagcacagcatccctgtgaacctagggcccagctgctgtgggttctacatcggcactagggtcacactgcagaaaccgttgataaaacaaactcagtgatctctgctttcctattggtgggcatggcaggggcgggtgatgagatttgcttagcactgactgactggcctgctaagaacacaagcccacagccaggggctccctggtccacagctgggtctcaggccccttacctgccttccaagtcctttcgcagactcttgagtgtggctttctgtcctagccagcatgtcccacagactctgttgttcctccaacgcccgtcattagtgacagctttctctctgagtttctgtggtgtggagagtgggtagaagtaggtttatctttcccgctgtctgccccactcaaggacgatgttagcgctcagccatccctgcccagcacagctgctcagcctcatgctcccacccgcacccttgctgtgcagaacctaaggcttgctcccgtcccagactcgagtggacggacatccatgtccacccaggattgacgaaggaaggaacttcacactcctctatcatgcaaaaatagttttcaatttttactttttagcttgggttttgaaaggcaaactctaggaggcttaaaacgggcagttactcttaaggcgaggtagatacctcatcctgcaccgcagcctctgtattctggtgggagctgtaagggttgcgggcttccggtgtccatgcatcaagccaaagtctccaaaacttgggcattgaattagggcaaatcttaaatagttttggggttggattttagtcctacaggtgatgattgaacgtggctggcttctccacagcctaaggaacccccatggggacacacccaccacccaatgacccatgcacctctgcctggacagctcacttccagccctaaggaccactgtgctcaagatgtgtggctgtagtaagacagtctcatgtcaggcattaagtcaaggccttccttcacacctgcgggacagcgcttctgaggctccagttctgctctgctcgaagcaggagggatgggttgtgaaggagtctgggatgtgactgggaccctcgcatctcacactcggcactctgcctctttccatccatgtttgagagccctggtctcaccaggaagtgcagagcaggagccgactgtgtgtgtaatgctctagtgtttgtagttctcttcactagccttgcagcgccagggaggccgggctggaatttgagcctaacatgttaggtttttacgggaaagctctttttccagctgtctcccaagtgcgtattgtgggccaaggagactggtatgggaaggggggatggtcaaggttccaagccagaaatggaaggtgcccagcacccctggattttacatgttcttgtattcagtaatctcagacgatttacacggaaatcagaagatgtcttcaaatacccttagactggatagagtgatggggaagcagatgatgcattgaaattttggtttttaaaaaatcacttagatgctgggagtaatggtgacacacacccttggtcccgtgacctgggaggccctgtctcaaaacaaaacaaaaaatcatttagatgcattttgtgttccttaaataaattttttaaaaagtgaaaaaaaaaaaaaaaaaa

SEQ ID NO: 44 - protein, 456 aa, Mus musculus
MTTDEGTSNNGENPAATMTEQGEDITTKKDRGVLKIVKRVGTSDEAPMFGDKVYVHYKGMLSDGKKFDSSHDRKKPFAFSLGQGQVIKAWDIGVSTMKKGEICHLLCKPEYAYGSAGHLQKIPSNATLFFEIELLDFKGEDLFEDSGVIRRIKRKGEGYSNPNEGATVKVHLEGCCGGRTFDCRDVVFVVGEGEDHDIPIGIDKALVKMQREEQCILYLGPRYGFGEAGKPKFGIDPNAELMYEVTLKSFEKAKESWEMDTKEKLTQAAIVKEKGTVYFKGGKYTQAVIQYRKIVSWLEMEYGLSEKESKASESFLLAAFLNLAMCYLKLREYNKAVECCDKALGLDSANEKGLYRRGEAQLLMNDFESAKGDFEKVLAVNPQNRAARLQISMCQRKAKEHNERDRRVYANMFKKFAERDAKEEASKAGSKKAVEGAAGKQHESQAMEEGKAKGHV

SEQ ID NO: 45 - DNA, 4437 bp, Mus musculus
tggcggctgggtggggattggctggaggggctgtaattcagcggtttccggagctgcagtgtagacagggagggggaacctggggttccgacgtcgcggcggagggaacgagccctaaccggatcgctgaggtacaaccccgctcggtgtcgcctgaccgcgtcggctaggagaggccaggcggccctcgggagcccagcagctcgcgcctggagtcagcgcaggccggccagtcgggcctcagccccggagacagtcgagacccctgactgcagcaggatggctcagtggaaccagctgcagcagctggacacacgctacctggagcagctgcaccagctgtacagcgacagcttccccatggagctgcggcagttcctggcaccttggattgagagtcaagactgggcatatgcagccagcaaagagtcacatgccacgttggtgtttcataatctcttgggtgaaattgaccagcaatatagccgattcctgcaagagtccaatgtcctctatcagcacaaccttcgaagaatcaagcagtttctgcagagcaggtatcttgagaagccaatggaaattgcccggatcgtggcccgatgcctgtgggaagagtctcgcctcctccagacggcagccacggcagcccagcaagggggccaggccaaccacccaacagccgccgtagtgacagagaagcagcagatgttggagcagcatcttcaggatgtccggaagcgagtgcaggatctagaacagaaaatgaaggtggtggagaacctccaggacgactttgatttcaactacaaaaccctcaagagccaaggagacatgcaggatctgaatggaaacaaccagtctgtgaccagacagaagatgcagcagctggaacagatgctcacagccctggaccagatgcggagaagcattgtgagtgagctggcggggctcttgtcagcaatggagtacgtgcagaagacactgactgatgaagagctggctgactggaagaggcggcagcagatcgcgtgcatcggaggccctcccaacatctgcctggaccgtctggaaaactggataacttcattagcagaatctcaacttcagacccgccaacaaattaagaaactggaggagctgcagcagaaagtgtcctacaagggcgaccctatcgtgcagcaccggcccatgctggaggagaggatcgtggagctgttcagaaacttaatgaagagtgccttcgtggtggagcggcagccctgcatgcccatgcacccggaccggcccttagtcatcaagactggtgtccagtttaccacgaaagtcaggttgctggtcaaatttcctgagttgaattatcagcttaaaattaaagtgtgcattgataaagactctggggatgttgctgccctcagagggtctcggaaatttaacattctgggcacgaacacaaaagtgatgaacatggaggagtctaacaacggcagcctgtctgcagagttcaagcacctgacccttagggagcagagatgtgggaatggaggccgtgccaattgtgatgcctccttgatcgtgactgaggagctgcacctgatcaccttcgagactgaggtgtaccaccaaggcctcaagattgacctagagacccactccttgccagttgtggtgatctccaacatctgtcagatgccaaatgcttgggcatcaatcctgtggtataacatgctgaccaataaccccaagaacgtgaacttcttcactaagccgccaattggaacctgggaccaagtggccgaggtgctcagctggcagttctcgtccaccaccaagcgggggctgagcatcgagcagctgacaacgctggctgagaagctcctagggcctggtgtgaactactcagggtgtcagatcacatgggctaaattctgcaaagaaaacatggctggcaagggcttctccttctgggtctggctagacaatatcatcgaccttgtgaaaaagtatatcttggccctttggaatgaagggtacatcatgggtttcatcagcaaggagcgggagcgggccatcctaagcacaaagcccccgggcaccttcctactgcgcttcagcgagagcagcaaagaaggaggggtcactttcacttgggtggaaaaggacatcagtggcaagacccagatccagtctgtagagccatacaccaagcagcagctgaacaacatgtcatttgctgaaatcatcatgggctataagatcatggatgcgaccaacatcctggtgtctccacttgtctacctctaccccgacattcccaaggaggaggcatttggaaagtactgtaggcccgagagccaggagcaccccgaagccgacccaggtagtgctgccccgtacctgaagaccaagttcatctgtgtgacaccattcattgatgcagtttggaaataacggtgaaggtgctgagccctcagcaggagggcagtttgagtcgctcacgtttgacatggatctgacctcggagtgtgctacctcccccatgtgaggagctgaaaccagaagctgcagagacgtgacttgagacacctgccccgtgctccacccctaagcagccgaaccccatatcgtctgaaactcctaactttgtggttccagatttttttttttaatttcctacttctgctatctttgggcaatctgggcactttttaaaatagagaaatgagtgagtgtgggtgataaactgttatgtaaagaggagagcacctctgagtctggggatggggctgagagcagaagggagcaaggggaacacctcctgtcctgcccgcctgccctcctttttcagcagctcggggttggttgttagacaagtgcctcctggtgcccatggcatcctgttgccccactctgtgagctgataccccaggctgggaactcctggctctgcactttcaaccttgctaatatccacatagaagctaggactaagcccagaggttcctctttaaattaaaaaaaaaaaaaataagaattaaagggcaaaacacactgacacagcatagcctttccatatcaaggaatactcagttaacagcctctccagcgctgtcttcaggctgatcatctatataaaccctggaatggttgcagatcaaatctgtaaaagagatccgagagctgtggcttggcctctggttcaaacacaaaggctagagagaacctagatatccctgggttttgtttacccagtatgcttgtcggttggaggtgtgaggtaggccaagggcactggaaagcctttgtcatcaccctactccctccccaacccagactccagaccctgtttcagggtcagcctgccctgtgggtgccttactgggcctagggtcaacctgccttcctttcccacttgaccttgctggtagtatgtccccttcccatgtccaaaggccctctgtcctgcttctattgggaatccctgcctcaggaccttgtgtcgagagggattgccttacaggtttgaacctgcctcagactacaggccctcagcaaagctcagggagtatggtccttattctatgcgcttggttcccagggatatctgtaaccacagggcaaaagctgacatatactccaggtctgccctcatatgagtggtgtattcttggcctcccctgagactggcaactgtctgctccccattgggtctcccaggtgaggtggaacacagttcctgcacctactgtggcctccatgtcgcttgcttgcttcgctcactcagcttactggaacactgagtgttcaaggcaagcctttcctgacagaggcatggctagattcagtgactcaaagccacctcattcagctgatcagtgtctgtggaattgtttccttccagttaaccagtgtctgaattaagggcagtgaggacattgtctccaagacgaactgcttgccttgaccaccccagccttctgcttcgagacagttactgctctcccaccccatcaatgttctttagttatacaataagctgaacttataaactgaaagggtatttaggaaggcaaggcttgggcatttttatggctttcaatcctggggacccaggaacaaggtgagggcttctctggggctggtgttgtacctcaggggctctgggaagtctgtgtgcctgggttaaccacccatagtgagcccctggaactgcccactttccctctccttggccccacttggccccagcctcacccagcctgcagactgcttagcctttcagtgcagtggcttgtgttctggccactgcactcagattccaatgtaaactttctagtgtaaaaatttatattattgtgggttgttttttgttgttgtttgtttttgtatattgctgtaactactttaacttccagaaataaagattatataggaactgtc

SEQ ID NO: 46 - protein, 722 aa, Mus musculus
MAQWNQLQQLDTRYLEQLHQLYSDSFPMELRQFLAPWIESQDWAYAASKESHATLVFHNLLGEIDQQYSRFLQESNVLYQHNLRRIKQFLQSRYLEKPMEIARIVARCLWEESRLLQTAATAAQQGGQANHPTAAVVTEKQQMLEQHLQDVRKRVQDLEQKMKVVENLQDDFDFNYKTLKSQGDMQDLNGNNQSVTRQKMQQLEQMLTALDQMRRSIVSELAGLLSAMEYVQKTLTDEELADWKRRQQIACIGGPPNICLDRLENWITSLAESQLQTRQQIKKLEELQQKVSYKGDPIVQHRPMLEERIVELFRNLMKSAFVVERQPCMPMHPDRPLVIKTGVQFTTKVRLLVKFPELNYQLKIKVCIDKDSGDVAALRGSRKFNILGTNTKVMNMEESNNGSLSAEFKHLTLREQRCGNGGRANCDASLIVTEELHLITFETEVYHQGLKIDLETHSLPVVVISNICQMPNAWASILWYNMLTNNPKNVNFFTKPPIGTWDQVAEVLSWQFSSTTKRGLSIEQLTTLAEKLLGPGVNYSGCQITWAKFCKENMAGKGFSFWVWLDNIIDLVKKYILALWNEGYIMGFISKERERAILSTKPPGTFLLRFSESSKEGGVTFTWVEKDISGKTQIQSVEPYTKQQLNNMSFAEIIMGYKIMDATNILVSPLVYLYPDIPKEEAFGKYCRPESQEHPEADPGSAAPYLKTKFICVTPFIDAVWK

SEQ ID NO: 47 - DNA, 4487 bp, Mus musculus
tggcggctgggtggggattggctggaggggctgtaattcagcggtttccggagctgcagtgtagacagggagggggaacctggggttccgacgtcgcggcggagggaacgagccctaaccggatcgctgaggtacaaccccgctcggtgtcgcctgaccgcgtcggctaggagaggccaggcggccctcgggagcccagcagctcgcgcctggagtcagcgcaggccggccagtcgggcctcagccccggagacagtcgagacccctgactgcagcaggatggctcagtggaaccagctgcagcagctggacacacgctacctggagcagctgcaccagctgtacagcgacagcttccccatggagctgcggcagttcctggcaccttggattgagagtcaagactgggcatatgcagccagcaaagagtcacatgccacgttggtgtttcataatctcttgggtgaaattgaccagcaatatagccgattcctgcaagagtccaatgtcctctatcagcacaaccttcgaagaatcaagcagtttctgcagagcaggtatcttgagaagccaatggaaattgcccggatcgtggcccgatgcctgtgggaagagtctcgcctcctccagacggcagccacggcagcccagcaagggggccaggccaaccacccaacagccgccgtagtgacagagaagcagcagatgttggagcagcatcttcaggatgtccggaagcgagtgcaggatctagaacagaaaatgaaggtggtggagaacctccaggacgactttgatttcaactacaaaaccctcaagagccaaggagacatgcaggatctgaatggaaacaaccagtctgtgaccagacagaagatgcagcagctggaacagatgctcacagccctggaccagatgcggagaagcattgtgagtgagctggcggggctcttgtcagcaatggagtacgtgcagaagacactgactgatgaagagctggctgactggaagaggcggcagcagatcgcgtgcatcggaggccctcccaacatctgcctggaccgtctggaaaactggataacttcattagcagaatctcaacttcagacccgccaacaaattaagaaactggaggagctgcagcagaaagtgtcctacaagggcgaccctatcgtgcagcaccggcccatgctggaggagaggatcgtggagctgttcagaaacttaatgaagagtgccttcgtggtggagcggcagccctgcatgcccatgcacccggaccggcccttagtcatcaagactggtgtccagtttaccacgaaagtcaggttgctggtcaaatttcctgagttgaattatcagcttaaaattaaagtgtgcattgataaagactctggggatgttgctgccctcagagggtctcggaaatttaacattctgggcacgaacacaaaagtgatgaacatggaggagtctaacaacggcagcctgtctgcagagttcaagcacctgacccttagggagcagagatgtgggaatggaggccgtgccaattgtgatgcctccttgatcgtgactgaggagctgcacctgatcaccttcgagactgaggtgtaccaccaaggcctcaagattgacctagagacccactccttgccagttgtggtgatctccaacatctgtcagatgccaaatgcttgggcatcaatcctgtggtataacatgctgaccaataaccccaagaacgtgaacttcttcactaagccgccaattggaacctgggaccaagtggccgaggtgctcagctggcagttctcgtccaccaccaagcgggggctgagcatcgagcagctgacaacgctggctgagaagctcctagggcctggtgtgaactactcagggtgtcagatcacatgggctaaattctgcaaagaaaacatggctggcaagggcttctccttctgggtctggctagacaatatcatcgaccttgtgaaaaagtatatcttggccctttggaatgaagggtacatcatgggtttcatcagcaaggagcgggagcgggccatcctaagcacaaagcccccgggcaccttcctactgcgcttcagcgagagcagcaaagaaggaggggtcactttcacttgggtggaaaaggacatcagtggcaagacccagatccagtctgtagagccatacaccaagcagcagctgaacaacatgtcatttgctgaaatcatcatgggctataagatcatggatgcgaccaacatcctggtgtctccacttgtctacctctaccccgacattcccaaggaggaggcatttggaaagtactgtaggcccgagagccaggagcaccccgaagccgacccaggtagtgctgccccgtacctgaagaccaagttcatctgtgtgacaccaacgacctgcagcaataccattgacctgccgatgtccccccgcactttagattcattgatgcagtttggaaataacggtgaaggtgctgagccctcagcaggagggcagtttgagtcgctcacgtttgacatggatctgacctcggagtgtgctacctcccccatgtgaggagctgaaaccagaagctgcagagacgtgacttgagacacctgccccgtgctccacccctaagcagccgaaccccatatcgtctgaaactcctaactttgtggttccagatttttttttttaatttcctacttctgctatctttgggcaatctgggcactttttaaaatagagaaatgagtgagtgtgggtgataaactgttatgtaaagaggagagcacctctgagtctggggatggggctgagagcagaagggagcaaggggaacacctcctgtcctgcccgcctgccctcctttttcagcagctcggggttggttgttagacaagtgcctcctggtgcccatggcatcctgttgccccactctgtgagctgataccccaggctgggaactcctggctctgcactttcaaccttgctaatatccacatagaagctaggactaagcccagaggttcctctttaaattaaaaaaaaaaaaaataagaattaaagggcaaaacacactgacacagcatagcctttccatatcaaggaatactcagttaacagcctctccagcgctgtcttcaggctgatcatctatataaaccctggaatggttgcagatcaaatctgtaaaagagatccgagagctgtggcttggcctctggttcaaacacaaaggctagagagaacctagatatccctgggttttgtttacccagtatgcttgtcggttggaggtgtgaggtaggccaagggcactggaaagcctttgtcatcaccctactccctccccaacccagactccagaccctgtttcagggtcagcctgccctgtgggtgccttactgggcctagggtcaacctgccttcctttcccacttgaccttgctggtagtatgtccccttcccatgtccaaaggccctctgtcctgcttctattgggaatccctgcctcaggaccttgtgtcgagagggattgccttacaggtttgaacctgcctcagactacaggccctcagcaaagctcagggagtatggtccttattctatgcgcttggttcccagggatatctgtaaccacagggcaaaagctgacatatactccaggtctgccctcatatgagtggtgtattcttggcctcccctgagactggcaactgtctgctccccattgggtctcccaggtgaggtggaacacagttcctgcacctactgtggcctccatgtcgcttgcttgcttcgctcactcagcttactggaacactgagtgttcaaggcaagcctttcctgacagaggcatggctagattcagtgactcaaagccacctcattcagctgatcagtgtctgtggaattgtttccttccagttaaccagtgtctgaattaagggcagtgaggacattgtctccaagacgaactgcttgccttgaccaccccagccttctgcttcgagacagttactgctctcccaccccatcaatgttctttagttatacaataagctgaacttataaactgaaagggtatttaggaaggcaaggcttgggcatttttatggctttcaatcctggggacccaggaacaaggtgagggcttctctggggctggtgttgtacctcaggggctctgggaagtctgtgtgcctgggttaaccacccatagtgagcccctggaactgcccactttccctctccttggccccacttggccccagcctcacccagcctgcagactgcttagcctttcagtgcagtggcttgtgttctggccactgcactcagattccaatgtaaactttctagtgtaaaaatttatattattgtgggttgttttttgttgttgtttgtttttgtatattgctgtaactactttaacttccagaaataaagattatataggaactgtc

SEQ ID NO: 48 - protein, 770 aa, Mus musculus
MAQWNQLQQLDTRYLEQLHQLYSDSFPMELRQFLAPWIESQDWAYAASKESHATLVFHNLLGEIDQQYSRFLQESNVLYQHNLRRIKQFLQSRYLEKPMEIARIVARCLWEESRLLQTAATAAQQGGQANHPTAAVVTEKQQMLEQHLQDVRKRVQDLEQKMKVVENLQDDFDFNYKTLKSQGDMQDLNGNNQSVTRQKMQQLEQMLTALDQMRRSIVSELAGLLSAMEYVQKTLTDEELADWKRRQQIACIGGPPNICLDRLENWITSLAESQLQTRQQIKKLEELQQKVSYKGDPIVQHRPMLEERIVELFRNLMKSAFVVERQPCMPMHPDRPLVIKTGVQFTTKVRLLVKFPELNYQLKIKVCIDKDSGDVAALRGSRKFNILGTNTKVMNMEESNNGSLSAEFKHLTLREQRCGNGGRANCDASLIVTEELHLITFETEVYHQGLKIDLETHSLPVVVISNICQMPNAWASILWYNMLTNNPKNVNFFTKPPIGTWDQVAEVLSWQFSSTTKRGLSIEQLTTLAEKLLGPGVNYSGCQITWAKFCKENMAGKGFSFWVWLDNIIDLVKKYILALWNEGYIMGFISKERERAILSTKPPGTFLLRFSESSKEGGVTFTWVEKDISGKTQIQSVEPYTKQQLNNMSFAEIIMGYKIMDATNILVSPLVYLYPDIPKEEAFGKYCRPESQEHPEADPGSAAPYLKTKFICVTPTTCSNTIDLPMSPRTLDSLMQFGNNGEGAEPSAGGQFESLTFDMDLTSECATSPM

SEQ ID NO: 49 - DNA, 4484 bp, Mus musculus
tggcggctgggtggggattggctggaggggctgtaattcagcggtttccggagctgcagtgtagacagggagggggaacctggggttccgacgtcgcggcggagggaacgagccctaaccggatcgctgaggtacaaccccgctcggtgtcgcctgaccgcgtcggctaggagaggccaggcggccctcgggagcccagcagctcgcgcctggagtcagcgcaggccggccagtcgggcctcagccccggagacagtcgagacccctgactgcagcaggatggctcagtggaaccagctgcagcagctggacacacgctacctggagcagctgcaccagctgtacagcgacagcttccccatggagctgcggcagttcctggcaccttggattgagagtcaagactgggcatatgcagccagcaaagagtcacatgccacgttggtgtttcataatctcttgggtgaaattgaccagcaatatagccgattcctgcaagagtccaatgtcctctatcagcacaaccttcgaagaatcaagcagtttctgcagagcaggtatcttgagaagccaatggaaattgcccggatcgtggcccgatgcctgtgggaagagtctcgcctcctccagacggcagccacggcagcccagcaagggggccaggccaaccacccaacagccgccgtagtgacagagaagcagcagatgttggagcagcatcttcaggatgtccggaagcgagtgcaggatctagaacagaaaatgaaggtggtggagaacctccaggacgactttgatttcaactacaaaaccctcaagagccaaggagacatgcaggatctgaatggaaacaaccagtctgtgaccagacagaagatgcagcagctggaacagatgctcacagccctggaccagatgcggagaagcattgtgagtgagctggcggggctcttgtcagcaatggagtacgtgcagaagacactgactgatgaagagctggctgactggaagaggcggcagcagatcgcgtgcatcggaggccctcccaacatctgcctggaccgtctggaaaactggataacttcattagcagaatctcaacttcagacccgccaacaaattaagaaactggaggagctgcagcagaaagtgtcctacaagggcgaccctatcgtgcagcaccggcccatgctggaggagaggatcgtggagctgttcagaaacttaatgaagagtgccttcgtggtggagcggcagccctgcatgcccatgcacccggaccggcccttagtcatcaagactggtgtccagtttaccacgaaagtcaggttgctggtcaaatttcctgagttgaattatcagcttaaaattaaagtgtgcattgataaagactctggggatgttgctgccctcagagggtctcggaaatttaacattctgggcacgaacacaaaagtgatgaacatggaggagtctaacaacggcagcctgtctgcagagttcaagcacctgacccttagggagcagagatgtgggaatggaggccgtgccaattgtgatgcctccttgatcgtgactgaggagctgcacctgatcaccttcgagactgaggtgtaccaccaaggcctcaagattgacctagagacccactccttgccagttgtggtgatctccaacatctgtcagatgccaaatgcttgggcatcaatcctgtggtataacatgctgaccaataaccccaagaacgtgaacttcttcactaagccgccaattggaacctgggaccaagtggccgaggtgctcagctggcagttctcgtccaccaccaagcgggggctgagcatcgagcagctgacaacgctggctgagaagctcctagggcctggtgtgaactactcagggtgtcagatcacatgggctaaattctgcaaagaaaacatggctggcaagggcttctccttctgggtctggctagacaatatcatcgaccttgtgaaaaagtatatcttggccctttggaatgaagggtacatcatgggtttcatcagcaaggagcgggagcgggccatcctaagcacaaagcccccgggcaccttcctactgcgcttcagcgagagcagcaaagaaggaggggtcactttcacttgggtggaaaaggacatcagtggcaagacccagatccagtctgtagagccatacaccaagcagcagctgaacaacatgtcatttgctgaaatcatcatgggctataagatcatggatgcgaccaacatcctggtgtctccacttgtctacctctaccccgacattcccaaggaggaggcatttggaaagtactgtaggcccgagagccaggagcaccccgaagccgacccaggtgctgccccgtacctgaagaccaagttcatctgtgtgacaccaacgacctgcagcaataccattgacctgccgatgtccccccgcactttagattcattgatgcagtttggaaataacggtgaaggtgctgagccctcagcaggagggcagtttgagtcgctcacgtttgacatggatctgacctcggagtgtgctacctcccccatgtgaggagctgaaaccagaagctgcagagacgtgacttgagacacctgccccgtgctccacccctaagcagccgaaccccatatcgtctgaaactcctaactttgtggttccagatttttttttttaatttcctacttctgctatctttgggcaatctgggcactttttaaaatagagaaatgagtgagtgtgggtgataaactgttatgtaaagaggagagcacctctgagtctggggatggggctgagagcagaagggagcaaggggaacacctcctgtcctgcccgcctgccctcctttttcagcagctcggggttggttgttagacaagtgcctcctggtgcccatggcatcctgttgccccactctgtgagctgataccccaggctgggaactcctggctctgcactttcaaccttgctaatatccacatagaagctaggactaagcccagaggttcctctttaaattaaaaaaaaaaaaaataagaattaaagggcaaaacacactgacacagcatagcctttccatatcaaggaatactcagttaacagcctctccagcgctgtcttcaggctgatcatctatataaaccctggaatggttgcagatcaaatctgtaaaagagatccgagagctgtggcttggcctctggttcaaacacaaaggctagagagaacctagatatccctgggttttgtttacccagtatgcttgtcggttggaggtgtgaggtaggccaagggcactggaaagcctttgtcatcaccctactccctccccaacccagactccagaccctgtttcagggtcagcctgccctgtgggtgccttactgggcctagggtcaacctgccttcctttcccacttgaccttgctggtagtatgtccccttcccatgtccaaaggccctctgtcctgcttctattgggaatccctgcctcaggaccttgtgtcgagagggattgccttacaggtttgaacctgcctcagactacaggccctcagcaaagctcagggagtatggtccttattctatgcgcttggttcccagggatatctgtaaccacagggcaaaagctgacatatactccaggtctgccctcatatgagtggtgtattcttggcctcccctgagactggcaactgtctgctccccattgggtctcccaggtgaggtggaacacagttcctgcacctactgtggcctccatgtcgcttgcttgcttcgctcactcagcttactggaacactgagtgttcaaggcaagcctttcctgacagaggcatggctagattcagtgactcaaagccacctcattcagctgatcagtgtctgtggaattgtttccttccagttaaccagtgtctgaattaagggcagtgaggacattgtctccaagacgaactgcttgccttgaccaccccagccttctgcttcgagacagttactgctctcccaccccatcaatgttctttagttatacaataagctgaacttataaactgaaagggtatttaggaaggcaaggcttgggcatttttatggctttcaatcctggggacccaggaacaaggtgagggcttctctggggctggtgttgtacctcaggggctctgggaagtctgtgtgcctgggttaaccacccatagtgagcccctggaactgcccactttccctctccttggccccacttggccccagcctcacccagcctgcagactgcttagcctttcagtgcagtggcttgtgttctggccactgcactcagattccaatgtaaactttctagtgtaaaaatttatattattgtgggttgttttttgttgttgtttgtttttgtatattgctgtaactactttaacttccagaaataaagattatataggaactgtc

SEQ ID NO: 50 - protein, 769 aa, Mus musculus
MAQWNQLQQLDTRYLEQLHQLYSDSFPMELRQFLAPWIESQDWAYAASKESHATLVFHNLLGEIDQQYSRFLQESNVLYQHNLRRIKQFLQSRYLEKPMEIARIVARCLWEESRLLQTAATAAQQGGQANHPTAAVVTEKQQMLEQHLQDVRKRVQDLEQKMKVVENLQDDFDFNYKTLKSQGDMQDLNGNNQSVTRQKMQQLEQMLTALDQMRRSIVSELAGLLSAMEYVQKTLTDEELADWKRRQQIACIGGPPNICLDRLENWITSLAESQLQTRQQIKKLEELQQKVSYKGDPIVQHRPMLEERIVELFRNLMKSAFVVERQPCMPMHPDRPLVIKTGVQFTTKVRLLVKFPELNYQLKIKVCIDKDSGDVAALRGSRKFNILGTNTKVMNMEESNNGSLSAEFKHLTLREQRCGNGGRANCDASLIVTEELHLITFETEVYHQGLKIDLETHSLPVVVISNICQMPNAWASILWYNMLTNNPKNVNFFTKPPIGTWDQVAEVLSWQFSSTTKRGLSIEQLTTLAEKLLGPGVNYSGCQITWAKFCKENMAGKGFSFWVWLDNIIDLVKKYILALWNEGYIMGFISKERERAILSTKPPGTFLLRFSESSKEGGVTFTWVEKDISGKTQIQSVEPYTKQQLNNMSFAEIIMGYKIMDATNILVSPLVYLYPDIPKEEAFGKYCRPESQEHPEADPGAAPYLKTKFICVTPTTCSNTIDLPMSPRTLDSLMQFGNNGEGAEPSAGGQFESLTFDMDLTSECATSPM

SEQ ID NO: 51 - DNA, 5122 bp, Mus musculus
cttctcgcaggaaagccccgcgcggcgcgtggagcctgaactcgcaggttctggctggacttctcgaagctgaggagaagcagagggacctggcttctgattttggatctgcgtgcttgctggttctggcgcctgctggtcttgttcctgtaacctaggactcggggcttgcacatgctttttttttgaagttgctggagagggagcccaggaccttgtgcaggcaccttttgtgtccccaatggggcggctttgcaccaagttcctgacctctgtgggctgtctgattttgctgttggtgactggatctgggagcatcaaggtcctgggtgagcccacctgcttctctgactacatccgcacttccacgtgtgagtggttcctggatagcgctgtggactgcagttctcagctctgcctacactacaggctgatgttcttcgagttctctgaaaacctcacatgcatcccgaggaacagtgccagcactgtgtgtgtgtgccacatggaaatgaataggccggtccaatcagacagataccagatggaactgtgggctgagcacagacagctgtggcagggctccttcagccccagtggtaatgtgaagcccctagctccagacaacctcacactccacaccaatgtgtccgacgaatggctgctgacctggaataacctgtacccatcgaacaacttactgtacaaagacctcatctccatggtcaacatctccagagaggacaaccctgcagaattcatagtctataatgtgacctacaaggaacccaggctgagcttcccgatcaacatcctgatgtcaggggtctactatacggcgcgtgtgagggtcagatcccagatactcactggcacctggagtgagtggagtcctagcatcacgtggtacaaccacttccagctgcccctgatacagcgccttccactgggggtcaccatctcctgcctctgcatcccgttgttttgcctgttctgttacttcagcattaccaagattaagaagatatggtgggaccagattcccaccccagcacgcagtcccttggtggccatcatcattcaggatgcacaggtgcccctctgggataagcagacccgaagccaggagtcaaccaagtacccgcactggaaaacttgtctagacaagctgctgccttgcttgctgaagcacagagtaaagaagaagacagacttcccgaaggctgccccaaccaagtctctccagagtcctggaaaggcaggctggtgtcccatggaggtcagcaggaccgtcctctggccagagaatgttagtgtcagtgtggtgcgctgtatggagctgtttgaggccccagtacagaatgtggaggaggaagaagatgagatagtcaaagaggacctgagcatgtcacctgagaacagcggaggctgcggcttccaggagagccaggcagacatcatggctcggctcactgagaacctgttttccgacttgttggaggctgagaatgggggccttggccagtcagccttggcagagtcatgctcccctctgccttcaggaagtgggcaggcttctgtatcctgggcctgcctccccatggggcccagtgaggaggccacatgccaggtcacagagcagccttcacacccaggccctctttcaggcagcccagcccagagtgcacctactctggcttgcacgcaggtcccacttgtccttgcagacaatcctgcctaccggagttttagtgactgctgtagcccggccccaaatcctggagagctggctccagagcagcagcaggctgatcatctggaagaagaggagcctccaagcccggctgacccccattcttcagggccaccaatgcagccagtggagagctgggagcagatccttcacatgagtgtcctgcagcatggggcagctgctggctccaccccagcccctgccggtggctaccaggagtttgtgcaggcagtgaagcagggtgccgcccaggatcctggggtgcctggtgtcaggccttctggagaccccggttacaaggccttctcgagcctgctcagcagcaatggcatccgcggggacacagcagcagcggggactgacgatgggcatggaggctacaagcccttccagaatcctgttcctaaccagtcccctagctccgtgcccttatttactttcggactagacacggagctgtcacccagtcctctgaactcagacccacccaaaagccccccagaatgccttggtctggagctggggctcaaaggaggtgactgggtgaaggcccctcctcctgcagatcaggtgcccaagccctttggggatgacctgggctttggtattgtgtactcgtccctcacttgccacttgtgtggccacctgaagcaacaccacagccaggaggaaggtggccagagccccatcgttgctagccctggctgtggctgctgctacgatgacagatcaccatccctggggagcctctcgggggccttggaaagctgtcctgagggaataccaccagaagccaacctcatgtcagcacccaagacaccctcaaacttgtcaggggagggcaagggccctggtcactctcctgttcccagccagacgaccgaggtgcctgtgggcgccctgggcattgctgtttcttaggtgagtgagtgtgctgttgttgctgaggtctgtgctgaggccagggttcctccaagccagggaagtacttcctgggagacagcccagctggcaggtttcccagaaatccagagaatggtgaattgaagatgtaaacttggcctgaccctggacgctcggagcctggctgtctcctcttccactggcctgggctctcctccctcccaagggatacaggggctcactgtgcttggtcccacagcagtgctgacgttcctaagtcctgggctttcctagctgatgttgtcctacctactcagtcccattttgtccaccgaatagacctgtcactcaaggctctcagcggtcctgccatagctgctggacgctcccagctggaagctgggcctagaaactcacagatggcctggcagtggcatgggaggccctaaaaattagtggaaattttgagagaggacaggtattgccccacagaggccattcattgaacagccaggactgggactagaggcagagcctgctgtcctccgctcagttgtagaaagcaacaaggacacaaacttgattgcccaaagtcactgccagttacccacatatgaccagaagccagggctcctgggatgtggaagataaacaaacacagttgccgggtggcagggcccagcgggcacgataactggcagtcaaggcgatacctcgagggaactgtggggctggtcctggttggtggtcaggtggtagggatagcagatggcagactttggtgagtgagtgagtctgactgtgttctggaagatgggaccgggctcagcactgtctgctcacgtccccactgttgcaacacctagtctgtttgcaaggaggacaggacaggtcacatggagctttatgtcaataaagtctttatcttgtcaggtttcctttactatacacacgccgagcccacagtgcacgaaagctgaaatgtgcaggcagggggttggggaagtggggagacaaggccccagcagttggtttaagggaatgacttgggaatggggcagagctgtggctactccatctctcatccttaccctcctgctaccacagcttgtgcccatgtgtgcctgctcaggggaggggtcctcctctttccctctcctttaggcagagtgctagaggtgttggatgctccttagcacgcagagggcgtgacactggctgctaagtgttgttgaatgtgtcaaggcattgacatcagtaggccccacatcttaggcaggggatttggggtgtggcaacctgccaggccagcagagaacttgaatatgatgttcagaaggaaagacagagacaggtcacttagggaggcttgaaggaggccacttttgagatgagcccgtggtatctgcaaaaaagcctggaagaactcagaacatgcagcagatggctcatgtctgaagtttgaggcacagggatctggtgtggtcacagcatcagagagaagggtcctggcatgatggggactggtgtgcagttggatactggtattctgccttagttctgcctcttgagaggtggtccagtagaagccagcctcagactttcacatctcagaacagtcttttcaaagacaaggtctcagtgtggctcagacgggcctctagcatcactcggtctcctgagtgctgggatcacaggtgtgtgctactacacccagcttcccagagcagtcttaccacagcccctaagcaggggaggagaggaaacggagccatccaagatctacctcctgtgggcatccctcctgcctggctgaaggagaagtctgggtttaaaatccccattgctcagatttgtatcctggagggaagtgactcccacaggaatgaactgactgtcccaggaaattcttcccgctgtgcctttagaacttcctctgtaaagtacctcccttcagctggtggtgcctgtctttaacagtggctgacagccagggagtttgaggctagcctaggctttgacagtgagatcctgttcaataaacgcagcttcccagtccggcacttgaccttcaagctctgacctctggattagcccaggatttcttcactggtcctccaccttccacccccttccactgcttatacccgctcccatcatttccaacccaggaagctgctaagatctatgtggtagccctggctccattaccaccctctccccatctcctgggtgactgagggaactaaggtacaagcccgaggaacttgggattccctgccctgctgttaccttgcctcctgtctgccatcattaacataggaggtgccagcctgtgccgtcctggctcccatactcactacctaaggctacctgttgggaattccaaccctcaccagtcccatctcttcattctattaaaattacttatcaagcaaaaaaaaaaaaaaaaaaaaaaaaaaaaaa

SEQ ID NO: 52 - protein, 810 aa, Mus musculus
MGRLCTKFLTSVGCLILLLVTGSGSIKVLGEPTCFSDYIRTSTCEWFLDSAVDCSSQLCLHYRLMFFEFSENLTCIPRNSASTVCVCHMEMNRPVQSDRYQMELWAEHRQLWQGSFSPSGNVKPLAPDNLTLHTNVSDEWLLTWNNLYPSNNLLYKDLISMVNISREDNPAEFIVYNVTYKEPRLSFPINILMSGVYYTARVRVRSQILTGTWSEWSPSITWYNHFQLPLIQRLPLGVTISCLCIPLFCLFCYFSITKIKKIWWDQIPTPARSPLVAIIIQDAQVPLWDKQTRSQESTKYPHWKTCLDKLLPCLLKHRVKKKTDFPKAAPTKSLQSPGKAGWCPMEVSRTVLWPENVSVSVVRCMELFEAPVQNVEEEEDEIVKEDLSMSPENSGGCGFQESQADIMARLTENLFSDLLEAENGGLGQSALAESCSPLPSGSGQASVSWACLPMGPSEEATCQVTEQPSHPGPLSGSPAQSAPTLACTQVPLVLADNPAYRSFSDCCSPAPNPGELAPEQQQADHLEEEEPPSPADPHSSGPPMQPVESWEQILHMSVLQHGAAAGSTPAPAGGYQEFVQAVKQGAAQDPGVPGVRPSGDPGYKAFSSLLSSNGIRGDTAAAGTDDGHGGYKPFQNPVPNQSPSSVPLFTFGLDTELSPSPLNSDPPKSPPECLGLELGLKGGDWVKAPPPADQVPKPFGDDLGFGIVYSSLTCHLCGHLKQHHSQEEGGQSPIVASPGCGCCYDDRSPSLGSLSGALESCPEGIPPEANLMSAPKTPSNLSGEGKGPGHSPVPSQTTEVPVGALGIAVS

SEQ ID NO: 53 - DNA, 2337 bp, Mus musculus
gacgtccattgaatcgcgcgggcggccggtggcgagcgcggggctgcgccgggatcgctgcgccctccgccgctcgcctctgcgacgcgcgccgctcgcccgagccacccgccgccgcgctcctcgccccgcgcctgccccaggatggtctgcgccaggcaccagcccggcgggctctgcctcctgctgctgctactctgccagttcatggaggaccgcagcgcccaggctgggaattgctggctccgccaagcaaagaacggccgctgccaggtcctgtataagacagaactgagcaaggaagagtgttgcagcaccggccggctgagcacctcatggaccgaggaggatgtgaacgacaatactctcttcaagtggatgattttcaacgggggcgcccccaactgcatcccttgtaaagaaacgtgtgagaacgtggactgcggacctgggaaaaaatgtcgaatgaacaagaagaataaaccccgctgcgtctgtgccccagactgttccaacatcacctggaagggcccagtgtgtgggctggatgggaaaacctaccgcaacgaatgtgcactcctcaaggccagatgcaaagagcagccggaactagaagtacagtaccagggcaaatgtaaaaagacttgtagggatgttttttgtccaggcagctccacttgtgtggtggatcagaccaataatgcctactgtgtgacctgtaatcggatttgcccagagccctcctcttctgaacagtacctttgtggaaatgatggagtgacttactccagcgcctgccacctgagaaaggccacctgcttgctgggcagatccattggattagcctatgagggaaagtgtatcacaaagtcctgtgaagatatccagtgtggcggcgggaaaaaatgcctatgggattccaaggttggcagaggtcgctgctctctctgcgatgagctgtgtcctgacagtaagtcggatgagccggtctgtgccagtgacaatgccacatacgccagcgagtgtgccatgaaggaagctgcctgctcttctggcgtgcttcttgaagtgaagcattctggatcttgcaactccatctcggaagaaacggaggaagaggaggaggaggaagaccaggactacagctttcctatctcttccattctagagtggtaaactctccaccaatgttcagtgttgacatagcctttgggcaaaacgaaacacaacaaaataaataataataataaataataaaggaaagaaaaaagatagaaaagaagataagaaaaagaaaaatatattgttcataatgtaaataagtgtatgcttatttatttggggggaaaactatacattaaaggacctttgtcctaagctctctcccaggccacgttgttattcactgggcatggagagatggtcatttcgtggtctactggatgaggcctatagttgagacttgtagacatttatttatactgtgtcatgttttataatttatacataaaatgtctggttgactgtacaccttgtttttttgaagaaatttattcgtgaaaggaagagcagttgttatttattgtgaggtctcttgcttgtaaagtaaaactgttttttttttcccccttgtaaaccatttaagtccattcctcactatgcacacccacctgtctctctccgcatctcactgttagattcttttccacctttttaacaaatttgcatgtcagtttctgtcatgtttatttattggattctcagctgcctaatctgtacatacctgatccctcgggttttgtttacaaggaatcttgactgaccaaaaggcattgtaactctgccacagtacaaggtacagagtatgggcatcttagaggaaatgtctgcttccgtcccctcgttctggtgaacgttgggagagaggatgagagagacattaaaattctggagatgtgcttttatgatgttacagatccaaagacatagagtgatgtgggtgtcaggagactgaagagaggtgaaaggcacactttcaacctgtcattcagcgtttcttttgagcttagtcagctgtaccttttcaattagttctttttcaaccaatgtgtcactaaaagttccatcaaagctttatcagttcaagtttcttgcttttcataatacttttttctgatgcaattttatattttcaaacatggcaagttaaatataaattcatttaaatatatagttttgtacttttctaccatgtaaatgtgcaatgtatataaaagttataatgtgtatttgtagataaatgatgagtgaaaaaataaaaaaaaaatgtaaaagcca

SEQ ID NO: 54 - protein, 343 aa, Mus musculus
MVCARHQPGGLCLLLLLLCQFMEDRSAQAGNCWLRQAKNGRCQVLYKTELSKEECCSTGRLSTSWTEEDVNDNTLFKWMIFNGGAPNCIPCKETCENVDCGPGKKCRMNKKNKPRCVCAPDCSNITWKGPVCGLDGKTYRNECALLKARCKEQPELEVQYQGKCKKTCRDVFCPGSSTCVVDQTNNAYCVTCNRICPEPSSSEQYLCGNDGVTYSSACHLRKATCLLGRSIGLAYEGKCITKSCEDIQCGGGKKCLWDSKVGRGRCSLCDELCPDSKSDEPVCASDNATYASECAMKEAACSSGVLLEVKHSGSCNSISEETEEEEEEEDQDYSFPISSILEW

SEQ ID NO: 55 - DNA, 1500 bp, Mus musculus
gcccgttgccaggcgccgccttataaacctcccgctcggccgccgccgcgccgagtccgagccgcgcacgggaccgggacgcagcggagcccgcgggccccgcgttcatgcaccgcctgctggcctgggacgcagcatgcctcccgccgccgcccgccgcctttagacccatggaagtggccaacttctactacgagcccgactgcctggcctacggggccaaggcggcccgcgccgcgccgcgcgcccccgccgccgagccggccattggcgagcacgagcgcgccatcgacttcagcccctacctggagccgctcgcgcccgccgcggacttcgccgcgcccgcgcccgcgcaccacgacttcctctccgacctcttcgccgacgactacggcgccaagccgagcaagaagccggccgactacggttacgtgagcctcggccgcgcgggcgccaaggccgcgccgcccgcctgcttcccgccgccgcctcccgcggcgctcaaggcggagccgggcttcgaacccgcggactgcaagcgcgcggacgacgcgcccgccatggcggccggtttcccgttcgccctgcgcgcctacctgggctaccaggcgacgccgagcggcagcagcggcagcctgtccacgtcgtcgtcgtccagcccgcccggcacgccgagccccgccgacgccaaggccgcgcccgccgcctgcttcgcggggccgccggccgcgcccgccaaggccaaggccaagaagacggtggacaagctgagcgacgagtacaagatgcggcgcgagcgcaacaacatcgcggtgcgcaagagccgcgacaaggccaagatgcgcaacctggagacgcagcacaaggtgctggagctgacggcggagaacgagcggctgcagaagaaggtggagcagctgtcgcgagagctcagcaccctgcggaacttgttcaagcagctgcccgagccgctgctggcctcggcgggccactgctagcgcggcgcggtggcgtggggggcgccgcggccaccgtgcgccctgccccgcgcgctccggccccgcgcgcgcgcccggaccaccgtgcgtgccctgcgcgcacctgcacctgcaccgaggggacaccgcgggcacaccgcgggcacgcgcggcgcacgcacctgcacagcgcaccgggtttcgggacttgatgcaatccggatcaaacgtggctgagcgcgtgtggacacgggactacgcaacacacgtgtaactgtctagccgggccctgagtaatcaccttaaagatgttcctgcggggttgttgatgtttttggttttgtttttgttttttgttttgttttgtttttttttttggtcttattattttttttgtattatataaaaaagttctatttctatgagaaaagaggcgtatgtatatttgagaaccttttccgtttcgagcattaaagtgaagacattttaataaacttttttgggagaatgtttaaaagccaaa

SEQ ID NO: 56 - protein, 296 aa, Mus musculus
MHRLLAWDAACLPPPPAAFRPMEVANFYYEPDCLAYGAKAARAAPRAPAAEPAIGEHERAIDFSPYLEPLAPAADFAAPAPAHHDFLSDLFADDYGAKPSKKPADYGYVSLGRAGAKAAPPACFPPPPPAALKAEPGFEPADCKRADDAPAMAAGFPFALRAYLGYQATPSGSSGSLSTSSSSSPPGTPSPADAKAAPAACFAGPPAAPAKAKAKKTVDKLSDEYKMRRERNNIAVRKSRDKAKMRNLETQHKVLELTAENERLQKKVEQLSRELSTLRNLFKQLPEPLLASAGHC

SEQ ID NO: 57 - DNA, 1683 bp, Mus musculus
tcttgaacttgttatgtagcaggaggccaaatttgagcatcctcttggcttctctttatagcagagattgtaggctggagacagttttgatgggtgccaacataaactgatttctgtaagagttgagtgttttatgaccctggcgtgcagatttaggatctggattaagcctgttgacttctccagctacttataaatttttgtgcataggtgccctgggtaaagcttggtctctgttactgcgtagtttttccagccgtcctcaatgccaatatcctaatattcaggtctctcccttagagtaatccagaatggctactcttatctttgttgataaggataatgaagaacccggccgccgtttggcatctaaggatgggttgaagctgggcactagtgtcaaggccttagatgggaaattgcaggtttcaacgcctcgagtcggcaaagtgttcaatgctccagccgtgcctaaagccagcagaaaggctttggggacagtcaacagagttgccgaaaagcctatgaagactggcaaacccctccaaccaaaacagccgaccttgactgggaaaaagatcaccgagaagtctactaagacacaaagttctgttcctgctcctgatgatgcctacccagaaatagaaaagttcttccctttcaatcctctagactttgagagttttgacctgcctggggagcaccagatctcacttctccccttgaatggcgtgcctctcatgaccctgaatgaagagagagggctggagaagctgctgcatctgggcccccctagccctctgaagacaccctttctatcatgggaatctggtaagggagtccgttcaaactcgggctgtaagcaacttgtcacatgacacgtttttgttgtcgggactgaattgtacaggtgagtctctgggcagcttcgggatattggggccaagtttagaataagaacttccctcagtcattgtgtatggttgagtcccaaaagaaggttttctggaaccttggccagcctttggtgatagcagtgggtgaagttgaacacagagctgcttaggctaggagttgaagtctgtggtaactgagactggatgagcactccaggttccacctgtggctgtcagagaaccagtgtagactgacagtaacttgtcaaccactgaaagcttaaggctttagttagaacgggtgtgtgtgtgtgtgtgtgtgtgtgtgtgtgtgtgtagggagagagagagagagagagagagaaagtgcctcaaatgagatgggttgccggtctgattttatgattttgtgagactttatgctcaagagaacaagtagctttcgcgtattttaaagacctgcttcttgactacccacactgatgccgccactgatgctacatgtaaaagatctgcatgtgtgcgtgagattcattagatgaatgtaggatgaaagttagcagctaatgtttgttatggatgatggctagaaaggaagcgcagaatctaacgagaaactcctcttcttccagatccgctgtactctcctcccagtgccctctccactctggatgttgaattgccgcctgtttgttacgatgcagatatttaaacttcttacttctttgtagtttctgtatgtatgttgtattaataaagcatttgtgcatatgttcaaaaaaaaaaa

SEQ ID NO: 58 - protein, 188 aa, Mus musculus
MATLIFVDKDNEEPGRRLASKDGLKLGTSVKALDGKLQVSTPRVGKVFNAPAVPKASRKALGTVNRVAEKPMKTGKPLQPKQPTLTGKKITEKSTKTQSSVPAPDDAYPEIEKFFPFNPLDFESFDLPGEHQISLLPLNGVPLMTLNEERGLEKLLHLGPPSPLKTPFLSWESGKGVRSNSGCKQLVT

SEQ ID NO: 59 - DNA, 5330 bp, Mus musculus
cggggcgggagtcttcgcagcaacgtgcgcggggccgcagcggcgcagacaccgcccgggccgcagacaccttcgctcgtcgctgctggctccgtgtcccagcccagctctgcggtaggcaggaggagcggccggatcgcgactccggagttcgcggccgtcgccaggcctcccggagcggcgccgacgctcccgctgtccggacgcgcgaccctgcgccagcgccgcagccacctgctcggagtccccgggcgagcacaaccatgcctcccactacggcgctctccgcgctgctgctgctgctactgtcgcctgcatctcactcccataatggaaatgagactagcacatctgctatcaaatctagcactgtccagagccaccaaagtgccacaacatcaacagaagtcacaactggtcacccagtggcatctacacttgcttcaacccagccaagcaaccctacaccattcacaacctcaacccaatctccatctatgccgacctccaccccaaaccccacgagcaatcaaagcggtggcaatctgacttccagtgtctccgaggtggacaagactaaaacaagctctcccagtagcacggccttcaccagtagcagtggacaaacagcctcctctggaggcaagagcggtgacagttttaccacagccccaacaaccactttggggctaatcaacgtctcttctcagcctactgaccttaataccacctcaaagcttctttctacccccacaacagacaacacaacaagccctcagcagcctgtggattcttcaccgagcacagcgagccatcctgtggggcagcatacccctgctgctgttcccagcagctctggctccacgcccagcactgacaactctacactgacatggaagcccactacacacaaaccattgggcacctctgaagccactcagcccctcaccagccagacaccaggcatcactacattgcccgtctccacactgcaacagtctatggcgtctacagtgggaactacgactgaagagttcacacacctcatctctaatgggactcccgtggcccctccaggccccagcacaccctctcccatctgggcctttggaaattaccagctaaactgtgaacctcccataaggccagatgaggaactccttattctgaacctcacaagagccagcctttgcgaaaggagccctctggatgagaaagagaaactcgtggaactgctgtgtcactcagtcaaagcgtccttcaagccagctgaggatttgtgcactctacatgtggcccctattctagataaccaggcggtggcagtgaagagaatcattatcgagacgaagctttctcctaaggccgtgtatgagctactgaaggacagatgggatgacctgacagaggccggagtcagtgacatgaagctggggaaggaagggcctccagaggtcaatgaggaccgcttcagcctgccgctcatcatcaccatcgtctgcatggcatccttcctgctccttgttgctgccctctacggctgctgtcaccagcggatctcccagaggaaggaccagcaacggctcacagaggagctgcagacagtggagaatggttaccatgacaacccaaccttggaagtgatggagactccttctgagatgcaggagaagaaggtggtcaaccttaatggggagctgggggacagttggatcgtccctctggacaacttgaccaaggatgacctagatgaggaggaagacacacacctctgatctgtctgctggccaccccaactgcactgcagagctccagaccacccaaagtgccatttggacagggagggggaaatcttcccacctgaagacagaaagactggggagggagaatggactccgaaggttgtctccctcctcacaatccctacagggccttaattttccttttcaagttcaacaaagtcacattctgtctagttccctcatgtaaaataacctacttgtgcctgagcccagagcaggaaggcaggaggaagatggagaacgccatgcgagtctctggagctcctccaggaacggcaccctctcatctcataactgaggccttaagaggtcaggtgacttgcacggggccacacagccctttggtgacaaaggttgtttccctcagtctggtgcttaattgcatccagacacactactgtgttcatctgtgcccattccccaaggcacaagacacttgcaggtgggcaggctggaaaagaaaaccaagcctctatggtctcaaggacaggtccccaatttccatctcctataacatggcctcggctagcttgttgtatcccacctctcatgagttagtctttagtcccattatttcccagggcatggctttgaacttcttgttctacattctgatttccttgcctttcttagtgggattgggactaaactcacaggcctcactatctaatggagtctgcctaaggggtgggtgggcaggcaaaggcatctcatgctctgatggcttccccaatagcttcctcatggcagctgattctgtactgagactggcctatcatttaagacactccctagaagacacttctcaaaaatctcctctggccgtctgcttctgctccttttttgttgttcactgctcagctgagtgggtgactcctcaaaacctagtgtcacatagcagttgtctaggaacagatatgtcctggggtcccaactggtccctgattggcaatgtgtctcagtagacaatcgatctaacctaccaggcattattattattccacaggaagctcagggacttttcaagttgctgagagcttgggttggtgtgctgtggtgtgttgtgtgtgtgtgcgccagctccttactgccaaaggccaaagctcagatcgtggagactgtgagctaattccatcggtttgcaccctcctttgccacatggagaaaggcccagattgtgcagttttaagataccttggcctactctcccagcacggagccaggcttttgtgtctggtgtgctttgtggcattccagctgtcccatttctgatggcctctcagggaacataaaaccatgcctagtacctagcacaggatttgtccaggctcagcggtgtcaggcagccatgtccaaggttgcgagggcccagcatagtgatgatgggtttcctgagaaaggggaaggggccctgtgtggagctttgaattaggcccatggtttgtattcttgtggtataagttcccaggactgtctggtttggagcagcttatttgaaaggggagctaggggggcagacaggtgtcctctgcctgagtccatctttaccactgtctctctgagatacagactagagagaaagaaaaggctgacagaagtcagggaaggctcctagtgagtttcacaggagcttgaaaaaaaggctaagaagaactcaacaagccccttggcatgcttctctaaggtttgcaggggagtgtggggaacagtgccaactggggggggggggggaattaggtctgtttgatccctgcattaggttctgccacccagtgggttcattctgtcatggtccgagaggcagacaggatttcttcttctcaatggggcaaggccatttgacagaccgcaaatgctttttctgcaaactggtcacagatttcaaccctacagtctgtcagctatgattgtaatattagacaacagatagtgtgtctgggctggaggaacagccatggctctgaccagactggcccagtgttccttcttgtgcactcaaattgtgtagccttttattacctggccttcacttgctcttacggctgggacatctgttcagcaagacatgctgctagcatctataaaagtcatcttcctgtggttatgaccgggtttttagagctgttaactcagaatctcaggcccagtcagagaaaagggagaggaagggaactttagagccagctgtaccaaagagaaaccagagctcttcatttcagtggcaaatggttctcccctagctgcaaaccccaagggcccgatggctgtgcctgagcacacccagcagctcttgtgctcccacgtgcatgtcaagagaggcaggtgagcatggggcactgagcagtctgcccggcagaaaaggacccagactcatctaggacactcacttctatcttccctgatagagtgagccagcccactctatcagtgtttgagttctattggtctttgcctattttttggacaatacactggtgaaactttggagagtaagttgaagttgacaagatctatgcatatttttgacaatgtaaatacaagagccacatgtttatttaccttgtactactttcagagagtaaacttggggtaaagatttgatagctatgagagatagctaagcctccctccccacttctgaacaagaatgtaaatgtctatttagtagagatgacttttttaaaaatgaagaaagtaacaagacaggctggtaacaaacgtatttgccttggagatagtggatttacacctcccctgccaagtcgcagtcctactgcagttcaggctggagttgagaatggtctgtgatggtcacggggaaaggtttggagatacagtctagtctccctacaggaaatcacatctgaagacacaaagagtctccccagggacagggacaagaggaaaacacgcatcccacactgcccaccctgtgctgcgtgtttctcaagaacagggaattaaggactgcaacttctaggtacaaggttataggagaccgccagccttcctcacgatgaccctggaggggctgggagaacacaagggacaatagcagccatatttggggctctggaatcatgtggtccgaggtgtaaataagcattctaggggcttgggtttttgtttttgttttcctgtcaggaattaattttgaaaactccttgaggaatgtccagcagaatgaggctcaaagggactgcatagatgaaggcagagggggagaagccctgtgtagaacagcctgtgtcaccgtcaggtgtctgatgcttccctcggtctgccgcaaacccaccactggccaggatcactgttttgtgggggcctttctgtttgtgaatgtcaaccagcttgcccaggagattgggggagtgtatgttgtagtggacaggggtctaaagtacactggaatttattgagagattatagttaactattgcattttcttataaagtctattttggaaaattgtacactgtcaataaaaatgcttttgtgtaaaaaaaaaaaaaaaaaaaaaaaaaaaaa

SEQ ID NO: 60 - protein, 503 aa, Mus musculus
MPPTTALSALLLLLLSPASHSHNGNETSTSAIKSSTVQSHQSATTSTEVTTGHPVASTLASTQPSNPTPFTTSTQSPSMPTSTPNPTSNQSGGNLTSSVSEVDKTKTSSPSSTAFTSSSGQTASSGGKSGDSFTTAPTTTLGLINVSSQPTDLNTTSKLLSTPTTDNTTSPQQPVDSSPSTASHPVGQHTPAAVPSSSGSTPSTDNSTLTWKPTTHKPLGTSEATQPLTSQTPGITTLPVSTLQQSMASTVGTTTEEFTHLISNGTPVAPPGPSTPSPIWAFGNYQLNCEPPIRPDEELLILNLTRASLCERSPLDEKEKLVELLCHSVKASFKPAEDLCTLHVAPILDNQAVAVKRIIIETKLSPKAVYELLKDRWDDLTEAGVSDMKLGKEGPPEVNEDRFSLPLIITIVCMASFLLLVAALYGCCHQRISQRKDQQRLTEELQTVENGYHDNPTLEVMETPSEMQEKKVVNLNGELGDSWIVPLDNLTKDDLDEEEDTHL

SEQ ID NO: 61 - DNA, 849 bp, Mus musculus
acctggtcctgttcctgcagggtctgcagcctgcccagagcagccaggaggatgtcccatatttaggcagactgcctggctacagggctgctgcggcctggagaagccgccctgaagttggttggagtctgggaaaggccatcgggagcaggcttgggcaggaagccgagcccccggggagctgggagctgcggttcccgagccagtcacgtcctgcgcgcggggggcggtagcctgggcccgcgggtatttggggaagcgtcccagttctaggcgcttccagtggctcccttgcacaagtgacttctgggcccagttctggggcaaagatgcctgcccttcacatcgaggatctgccggaaaaggaaaaactgaagatggaggttgagcaacttcgcaaagaagtcaagttgcagagacaacaggtatctaaatgttctgaggaaataaagaactacattgaagaacgttctggagaggatcctctggtaaagggaatcccagaagacaagaatcccttcaaagaaaagggcagctgtgtcatttcataagtaactctgggggagggaaattctgttcttttgtttaattttcccccaaatgaagccaaagtgtgtgttgaagaactgagaaaaaataaaatcgagaaaaagactgtcatataagcactctccaagcagttggggtgtgaatcatacctgcttctcaccttggctccccacacactctctctcagaggagagcatctgattgcagttatggaatgaaggcatggctcccccactttcagtatactccttgctgtctccaataaagttttatcttggaaaaatcaaaaaaaaaaaaaaa

SEQ ID NO: 62 - protein, 73 aa, Mus musculus
MPALHIEDLPEKEKLKMEVEQLRKEVKLQRQQVSKCSEEIKNYIEERSGEDPLVKGIPEDKNPFKEKGSCVIS

SEQ ID NO: 63 - DNA, 2188 bp, Mus musculus
ggcacgagggaaggcctgaggtgactcacttccatcacaggaccagttgaattccagaagacccggtgccttggagcaacagccccatgacggtgcccagccatgcaatgttcttggaaggctgtcctcctcctcgccctggcctccattgccatccagtacacagccatccgcactttcaccgccaagtctttccacacttgccctgggctgacagatactggcttggcagagcggttgtgtgaggagggccctaccttctcctacaacctctccaggaagacccacgtcctgatcctggccaccacacgcagtggctcttcctttgtgggccagctcttcaaccagcacatggatgtcttctacctgttcgagccgctctatcacgtccaaaacacgctcatcccccggttcacccagggcaagagccccgcagatcgcagggtcatgctaggtgccagccgggacctgctgaggagcctttatgattgtgatctctactttctggagaactacatcaagccacctccagtcaaccacaccaccaacagggtcttccgcagaggggccagcagggtcctttgttcccgtccagtgtgtgaccctccagggtcctctgacctgatcctggaggagggggactgtgtgcgcatgtgtggcttgctgaacctgaccttggcagccgaggcttgtcgtgagcgcagtcatgtggccatcaagactgtgcgggtgcccgaggtgaatgacttgcgggctctagtggaagaccccaggctgaacctcaaggtcatccagctggtgcgagaccctcgtggcatcttggcttctcgcagtgagaccttccgggacacctaccggctctggcggctttggtacggcacagggaggaagccctacaacctggatgtgacacagctgaccactgtgtgtgaggatttctctagctctgtgtctactggcctcatgcggccctcctggctcaagggcaagtacatgctggtacgttatgaggacctggccagaaatccaatgaagaagacagaagagatctacgaattcctgggtatccccctggacagtcacgtggcacactggatccagaacaatacgaggggcgaccccactttgggcaagcacaaatacagcacagtgcgcaactctgcagccacagctgagaagtggcgcttccgcctctcctatgacatcgtggcctttgcccagaatgcctgccagcaggtgttggctcagctgggctacaagatggccaactcggaggaggaactgaagaatccggccatcagcctagtggaggagcgtgacttccgcccttttttgtgacctgggtgtggtgggggtgggaggcaggtggctctggttttgctgacgcggacctactatgggccgtctttaactgttgccttatctccctcctccctctcccaccctgtctgtgtatccattccagcccctgcccactctcccctttccttcgcctctcccacaccatctgtgtgtccttcttgaccttgcccacttccttttctcctgcctctttttgcccctgaaatttgcactatgtctctggaggggaacactgggcagagggcgtatgatgtggggttactccccccaccccatttagacacaaggatgttgggtctctgtgaggatggggacgatgtttacaggcacccaatcgcacattcattcacacgtgcacacaggcacacgatgagaggcaccccagcacacaactggtagttttgcaattgtcttctcaaggtaagaggatggacacaaaggggccgtacctccccagtttaaggaaagggtccatccccgcccccttcctgctccctcccctggagtagggcacccgtccctcctgcacacccttgcctggtggtgagcagggttttactgtgaggtgaattgggactactttctatttggtttgtggtgagcttgtctgtctgagtcttgtggctacccctagaccagtaatggctaatgaatcttagaagtttctgattgatcttggggtccctctgtgctatttctttgtgccaaaaaaaaaaaagacaaaaaaaatgtggatcagtttgcagagtgaaaattgaaatgctttatttgtgttttctgtaaataaaaatgtgcagtactgaaaaaaaaaaaaaaaaaaaaaaaa

SEQ ID NO: 64 - protein, 411 aa, Mus musculus
MQCSWKAVLLLALASIAIQYTAIRTFTAKSFHTCPGLTDTGLAERLCEEGPTFSYNLSRKTHVLILATTRSGSSFVGQLFNQHMDVFYLFEPLYHVQNTLIPRFTQGKSPADRRVMLGASRDLLRSLYDCDLYFLENYIKPPPVNHTTNRVFRRGASRVLCSRPVCDPPGSSDLILEEGDCVRMCGLLNLTLAAEACRERSHVAIKTVRVPEVNDLRALVEDPRLNLKVIQLVRDPRGILASRSETFRDTYRLWRLWYGTGRKPYNLDVTQLTTVCEDFSSSVSTGLMRPSWLKGKYMLVRYEDLARNPMKKTEEIYEFLGIPLDSHVAHWIQNNTRGDPTLGKHKYSTVRNSAATAEKWRFRLSYDIVAFAQNACQQVLAQLGYKMANSEEELKNPAISLVEERDFRPFL

SEQ ID NO: 65 - DNA, 6604 bp, Mus musculus
tcaggaaacagctcagactgaggcgtgcagcaggctcaggaggaagaagggcggtagaggcagaggaggtggccttgcctggccacaagggctctgagggtccctgcctgaagagggagaggagatccgggccaggggcaggcgctctggaatgcagccccagttgctgctgctgctgctcttgccactcaatttccctgtcatcctgaccagagagcttctgtgtggaggatccccagagccctgtgccaacggaggcacctgcctgaggctatctcggggacaagggatctgccagtgtgcccctggatttctgggtgagacttgccagtttcctgacccctgcagggatacccaactctgcaagaatggtggcagctgccaagccctgctccccacacccccaagctcccgtagtcctacttctccactgacccctcacttctcctgcacctgcccctctggcttcaccggtgatcgatgccaaacccatctggaagagctctgtccaccttctttctgttccaacgggggtcactgctatgttcaggcctcaggccgcccacagtgctcctgcgagcctgggtggacaggtgagcaatgccagctccgagacttctgctcagccaacccctgtgccaacggaggcgtgtgcctggccacatacccccagatccagtgccgctgtccacctgggttcgagggtcacacctgtgaacgcgacatcaacgagtgcttcctggagccgggaccctgccctcagggcacctcctgccataacaccttgggttcctaccagtgtctctgccctgtggggcaggaaggtccccagtgcaagctcaggaagggagcctgccctcctggaagctgtctcaatgggggcacctgccagctggtcccagagggacactccacctttcatctctgcctctgtcccccaggtttcacggggctggactgtgagatgaacccagatgactgtgtcaggcaccagtgtcagaacggggccacctgtctggatgggctggacacctacacctgcctctgccccaagacatggaagggctgggactgctctgaagatatagatgaatgtgaagcccggggtccccctcgctgcaggaacggtggcacctgccagaacacagctggcagctttcactgtgtgtgcgtgagtggctggggaggcgcaggctgtgaggagaacctggatgactgtgcagctgccacctgtgccccgggatccacctgcatcgaccgtgtgggctccttctcctgcctctgcccacctggacgcacaggcctcctgtgccacctggaagacatgtgtttgagtcagccgtgccacgtgaatgcccagtgcagcaccaaccctctgacaggctccaccctctgcatatgccagcctggctactcaggatccacctgtcaccaagatctggatgagtgccaaatggcccagcaaggacccagtccctgcgaacatggcggctcctgcatcaacacccctggctccttcaactgcctctgcctgcctggttacacgggctcccgctgtgaagctgaccacaatgagtgcctgtcacagccctgccacccaggcagcacctgcctggacctgcttgcaaccttccactgcctctgcccaccaggcttggaagggaggctctgtgaggtggaggtcaatgagtgcacctctaatccctgcctgaaccaagctgcctgccatgacctgctcaacggcttccagtgcctctgccttcctggattcaccggcgcccgatgtgagaaagacatggacgagtgtagcagcaccccctgtgccaatggggggcgctgccgagaccagcctggagccttctactgcgagtgtctcccaggctttgaagggccacactgtgagaaagaagtggacgaatgtctgagtgacccctgccccgtgggagccagctgccttgatctccccggagcattcttctgcctctgccgtcctggtttcacaggtcaactttgtgaggttcccttgtgcacccccaacatgtgccaacctggacagcaatgccaaggtcaggaacacagagccccctgcctctgccctgacggaagtcctggctgtgttcctgccgaggacaactgcccctgtcaccatggccattgccagagatccttgtgtgtgtgtgatgagggctggactggaccagaatgcgagacagaactgggtggctgcatctccacaccctgtgcccatggggggacctgccacccacagccatctggctacaactgtacctgccctgcaggctacatggggttgacctgtagtgaggaggtgacagcttgtcactcagggccctgtctcaatggtggctcctgcagcatccgtcctgagggctattcctgcacctgccttccaagtcacacaggtcgccactgccagactgccgtggaccactgtgtgtctgcctcgtgcctcaatgggggtacctgtgtgaacaagcctggcactttcttctgcctctgtgccactggcttccaggggctgcactgtgaggagaagactaaccccagctgtgcagacagcccctgcaggaacaaggcaacctgccaagacacacctcgaggggcccgctgcctctgcagccctggctatacaggaagcagctgccagactctgatagacttgtgtgcccggaagccctgtccacacactgctcgatgcctccagagtgggccctcgttccagtgcctgtgcctccagggatggacaggggctctctgtgacttcccactgtcctgccagaaggccgcgatgagccaaggcatagagatctctggcctgtgccagaatggaggcctctgtattgacacgggctcctcctatttctgccgctgccctcctggattccaaggcaagttatgccaggataatgtgaacccctgtgagcccaatccctgccatcacgggtctacctgtgtgcctcagcccagtggctatgtctgccagtgtgccccaggctatgagggacagaactgctcaaaagtacttgacgcttgtcagtcccagccctgccacaaccacggaacctgtacctccaggcctggaggcttccactgtgcctgccctccaggcttcgtgggactgcgctgtgagggagatgtggatgagtgtctggaccggccctgtcacccctcgggcactgcagcttgccactctttagccaacgccttctactgccagtgtctgcctgggcacacaggccagcggtgtgaggtggagatggacctctgtcagagccaaccctgctccaatggaggatcctgtgagatcacaacagggccaccccctggcttcacctgtcactgccccaagggttttgaaggccccacctgcagccacaaagccctttcctgcggcatccatcactgccacaatggaggcctatgtctgccctcccctaagccagggtcaccaccactctgtgcctgcctcagtggttttgggggccctgactgtctgacacctccagctccaccgggctgcggtcccccctcaccctgcctgcacaatggtacctgcactgagacccctgggttgggcaacccgggctttcaatgcacctgccctcctgactctccagggccccggtgtcaaaggccaggggcaagtgggtgtgagggccgaggtggtgatgggacctgcgatgctggctgcagtggcccaggaggagactgggatggaggggactgttccctgggggtcccagacccctggaagggctgtcccccgcattcccagtgctggcttctgttccgggacggacggtgtcacccgcagtgtgactctgaggagtgtctctttgatggctacgactgtgaaatccctctaacctgcatcccagcctatgaccagtactgccgagatcacttccacaacgggcactgtgagaaaggctgcaataacgctgaatgtggctgggacgggggagactgcagaccagaaggggaagactcagaggggaggccctccctggccctgctggtggtgctgaggcccccagccctggatcagcagctgcttgccctggcacgagtgctgtccctgactctgagggtcggtctctgggtgaggaaggacagtgaaggcaggaacatggtgttcccctatcctgggacccgggccaaagaggagctgagtggagctagggattcctcttcatgggaaagacaagcccctcccactcagcccctgggcaaggagacagagtctcttggtgcagggtttgtggtagtgatgggagtggatctgtcccgctgtggtccggaacatcctgcgtcccgctgcccctgggactctggactcctgctgcgcttccttgcagcaatggcagcagtgggagctctggagcccctgctgcctggacccttgctggcggctcaccctcaagcagggaccaggccctctgccaaccagcttccctggcccattctatgttcaccagtggttggggtgcttctcctggcccttggggcccttctcgtcctccagctcattcggcgacggcgacgagaacatggggccctgtggctgccccctggtttcattcgaaggcctcagacacagcaggcaccccaccggcggaggcccccactgggcgaggacaacattggtcttaaggcactgaagccagaggccgaagtggatgaggatggagtggccatgtgctcgggccctgaagagggagaggctgaagaaacagcctcagcctccaggtgccagctttggccgctcaacagcggctgtggagagctcccccaggcagccatgctgacccctcctcaggagtgtgaatcggaggttctggatgtggacacctgtggacctgatggggtgacacccctgatgtcagccgtcttctgtgggggagtgcagtccacgactggggctagtccacagagactggggctaggaaatctggaaccctgggaaccactgctggatagaggggcctgcccccaggctcacactgtgggcactggagagacgcctctgcacctagctgccagattctctcggccaaccgctgcccgccgcctccttgaggctggagccaaccccaaccagccagaccgcgctgggcgcaccccacttcacactgctgtggctgccgacgctcgggaggtttgccagctcctattggccagcagacagactacggtggacgcccgcacagaggacgggactacacctttgatgctggctgccaggctggccgtggaggacctggttgaagaattgatcgcagcccgagcagatgtaggagccagggataaaaggggaaaaactgcactgcactgggccgctgctgtgaacaacgcccgagccgcccgctctctcctccaggctggagcggataaagatgcccaggacagtagggaacagacgccgcttttcctggcagcgcgcgaaggagccgtggaggtggcgcagctgttgctggagctcggggcggcccggggactgcgagaccaggccgggctggccccaggagatgtggcccgccagcgcagtcactgggacctgctaacgctgctggaaggggctggaccgactacgcaggaggcccgtgcgcacgcacgcaccacgccggggggcggggccgcgccgcgctgccggacgctgtctgcgggagcgcgcccgcgcgggggcggagcctgtctgcaggctcgcacttggtcggtggacttgggagcgcgcggagggaaggtgtatgctcgctgccggagccgatctggaagctgcggaggccccaccacgcgcggccgcaggttctccgcgggctcccgtggacgacgcggggctagggcatcacaggatgactggcctcgcgactgggtggccctggaagcctgcggctccgcctgcagtgcgccgatcccgcctcccagcctgaccccgtccccagaacgtggatcccctcaagttgcctggggtcttccagttcaccaagagattcccttaaactcggttgtaagaaatctgaactaggcagctgcgtggaaggaaggaagcgacacgtacgagtctggaagactccggacttttaaggccaaaataaccgttaagctcacttgtctcccccatagagtatgcacagcaatgggaagagggtttaggatgtccggttgagatagaccgtgattttcctggaaaatagggcagcttcaagaggacaaagttgatttcgagaatccctaaactctggaaccaagaactgtgggcgaattgggtgtaaaatgtttcttgtgtatggtttcccaaaaggagcctctgctatctactgcccacaagtagctggcaactatttattaagcacctacgatgtgccgggtgttgtgtagatgaacagtaagtaaccagtggcccatccagctgatgactccttgccctctctctgcctccccacaaggacactggtgcagggatgaggccatgttctccagtcactgctatctccgagaaccccaaactcatggataataaagctaatttgaagtgctactttatcttctgagggactaaagggtgagatggaaaaagtgcata

SEQ ID NO: 66 - protein, 1964 aa, Mus musculus
MQPQLLLLLLLPLNFPVILTRELLCGGSPEPCANGGTCLRLSRGQGICQCAPGFLGETCQFPDPCRDTQLCKNGGSCQALLPTPPSSRSPTSPLTPHFSCTCPSGFTGDRCQTHLEELCPPSFCSNGGHCYVQASGRPQCSCEPGWTGEQCQLRDFCSANPCANGGVCLATYPQIQCRCPPGFEGHTCERDINECFLEPGPCPQGTSCHNTLGSYQCLCPVGQEGPQCKLRKGACPPGSCLNGGTCQLVPEGHSTFHLCLCPPGFTGLDCEMNPDDCVRHQCQNGATCLDGLDTYTCLCPKTWKGWDCSEDIDECEARGPPRCRNGGTCQNTAGSFHCVCVSGWGGAGCEENLDDCAAATCAPGSTCIDRVGSFSCLCPPGRTGLLCHLEDMCLSQPCHVNAQCSTNPLTGSTLCICQPGYSGSTCHQDLDECQMAQQGPSPCEHGGSCINTPGSFNCLCLPGYTGSRCEADHNECLSQPCHPGSTCLDLLATFHCLCPPGLEGRLCEVEVNECTSNPCLNQAACHDLLNGFQCLCLPGFTGARCEKDMDECSSTPCANGGRCRDQPGAFYCECLPGFEGPHCEKEVDECLSDPCPVGASCLDLPGAFFCLCRPGFTGQLCEVPLCTPNMCQPGQQCQGQEHRAPCLCPDGSPGCVPAEDNCPCHHGHCQRSLCVCDEGWTGPECETELGGCISTPCAHGGTCHPQPSGYNCTCPAGYMGLTCSEEVTACHSGPCLNGGSCSIRPEGYSCTCLPSHTGRHCQTAVDHCVSASCLNGGTCVNKPGTFFCLCATGFQGLHCEEKTNPSCADSPCRNKATCQDTPRGARCLCSPGYTGSSCQTLIDLCARKPCPHTARCLQSGPSFQCLCLQGWTGALCDFPLSCQKAAMSQGIEISGLCQNGGLCIDTGSSYFCRCPPGFQGKLCQDNVNPCEPNPCHHGSTCVPQPSGYVCQCAPGYEGQNCSKVLDACQSQPCHNHGTCTSRPGGFHCACPPGFVGLRCEGDVDECLDRPCHPSGTAACHSLANAFYCQCLPGHTGQRCEVEMDLCQSQPCSNGGSCEITTGPPPGFTCHCPKGFEGPTCSHKALSCGIHHCHNGGLCLPSPKPGSPPLCACLSGFGGPDCLTPPAPPGCGPPSPCLHNGTCTETPGLGNPGFQCTCPPDSPGPRCQRPGASGCEGRGGDGTCDAGCSGPGGDWDGGDCSLGVPDPWKGCPPHSQCWLLFRDGRCHPQCDSEECLFDGYDCEIPLTCIPAYDQYCRDHFHNGHCEKGCNNAECGWDGGDCRPEGEDSEGRPSLALLVVLRPPALDQQLLALARVLSLTLRVGLWVRKDSEGRNMVFPYPGTRAKEELSGARDSSSWERQAPPTQPLGKETESLGAGFVVVMGVDLSRCGPEHPASRCPWDSGLLLRFLAAMAAVGALEPLLPGPLLAAHPQAGTRPSANQLPWPILCSPVVGVLLLALGALLVLQLIRRRRREHGALWLPPGFIRRPQTQQAPHRRRPPLGEDNIGLKALKPEAEVDEDGVAMCSGPEEGEAEETASASRCQLWPLNSGCGELPQAAMLTPPQECESEVLDVDTCGPDGVTPLMSAVFCGGVQSTTGASPQRLGLGNLEPWEPLLDRGACPQAHTVGTGETPLHLAARFSRPTAARRLLEAGANPNQPDRAGRTPLHTAVAADAREVCQLLLASRQTTVDARTEDGTTPLMLAARLAVEDLVEELIAARADVGARDKRGKTALHWAAAVNNARAARSLLQAGADKDAQDSREQTPLFLAAREGAVEVAQLLLELGAARGLRDQAGLAPGDVARQRSHWDLLTLLEGAGPTTQEARAHARTTPGGGAAPRCRTLSAGARPRGGGACLQARTWSVDLGARGGKVYARCRSRSGSCGGPTTRGRRFSAGSRGRRGARASQDDWPRDWVALEACGSACSAPIPPPSLTPSPERGSPQVAWGLPVHQEIPLNSVVRNLN

SEQ ID NO: 67 - DNA, 2021 bp, Mus musculus
gactgtaaagaatacagatcaggtgtaaatgtgaatttctgtccattttttcgttggagggcggggtggggggaggggcagaaacgaagattagtggactaaaagctctactcctgcagggtcacctttgtccctcgattactcttggacattggtacaggtaacagccaatagaagactcctagtccttaaaaccacttgccataaccaatggctgtaattttaggaaaggagtggtcttaagatgtgagggcttaaaacaccctacggaatccataggatctgtaagttgagttgaagagatgtatctttggtgagaaattggagccagttttataatttgaccgtgtttgggcaaattggggttttactccatcttttctggtcagtttctatgtgtgactcaaaactgtcactttgctctccttggttaaaggagaggaaggtctcaggaagccaggaagcccactctaattcttacaaaccccagagcttgagccacactgattacccccctgtgttctttgccaagagcatgccacaaaatatgtgacccgaaggcatcgaagaagccaagaatggaaaaattccctaaaggaaagtgacatttaattgggaaatttcagagatctgtcactcctagtgacaacccagaaaaaactgctttgcagctttgtgactggaggtgagctgcaactgtcagctgaagttagcagggactccctgcagggaggcctttaggggcggagagcaagggacagctgcctttgcacatggctcccccaatctcgaatagaatatcgtgtgtgtgtgtgtgtgtgtgtgtgtgtgtgtgtgtgtgtgtgtgtgtgtgtgtgtgtttaaagctgtaccaaaactgtagtttaaaatgctgtcaattttccaattaagatatccagcttgataagccgagctatggacccatgggagggggagaaaaacatggttcttgggagtttgtacaaaaaatatggtgctgggtgggtgctaagaacaaacggtcttataacccatggtctttctacacagatccgtttggggaaagactgcccccagagtagcctgcttttcataagcttcccaatcagatttcgggggcaaagcactcccctcctccctcgcacagcctgcttcttctctctgccctctctcgtccctcccattctctatttccctccccggcagggtgtagttgagtgaaggcaggatcaggttccccgcctacccgtccaaatatcccgccaaggaagccccagagcacaagaaaacccaaagtggagagaggggaagaaagaaagcactgagtcatccatccagaaggggggagagcagagcgcagccgcccaggcaggagcatcagccagcgatacctggagtctgcagaaacctcgcccgcactttgcaacaaaggcagccagctagtcagcgaggacctctgcaagccaaaaaatgtcgtcccagcaatatcagcagcaacgtagaaaatttgcagctgccttcctggcattgattttcatcttggcagctgtggacactgctgaggccgggaagaaagagaaacctgaaaaaaaggtgaaaaagtctgactgtggagaatggcagtggagtgtgtgcgtgcctaccagcggggactgtggattgggcacccgggagggcactcgcactggcgccgagtgcaaacagaccatgaagactcagagatgtaagatcccttgcaactggaagaagcagtttggagctgagtgcaagtaccagttccaggcttggggagaatgtgacctcaataccgccttgaagaccagaactggcagcctgaagcgagctctgcacaatgctgactgtcagaaaactgtcaccatctccaagccctgtggcaagctcaccaagcccaagcctcaagcggagtcaaagaagaagaaaaaggaaggcaagaaacaggagaagatgctggattaaaagacgccaccgtctgtggaccaggaaaagggcatcagcaaaca

SEQ ID NO: 68 - protein, 168 aa, Mus musculus
MSSQQYQQQRRKFAAAFLALIFILAAVDTAEAGKKEKPEKKVKKSDCGEWQWSVCVPTSGDCGLGTREGTRTGAECKQTMKTQRCKIPCNWKKQFGAECKYQFQAWGECDLNTALKTRTGSLKRALHNADCQKTVTISKPCGKLTKPKPQAESKKKKKEGKKQEKMLD

SEQ ID NO: 69 - DNA, 2851 bp, Mus musculus
ggaccttcgtccggggtttcggcacccccccttccccttccccggggtccgggggtgacattgcaccgcgcccctcctggggttgcgtcctcgccccacgcggactccccctcggcgcgcagctccctttcgccttccttggccggggttccctcccttccccagctgcccagtcatgggggctgctgtgtttttcggatgcaccttcgtcgcgttcggcccagccttctcccttttcctgatcactgtagctggagacccacttcgggttatcatcctggtggcgggagcctttttctggctggtctccctgctcttggcttctgtggtctggttcatcttggtccatgtgacagaccgatcagatgcacggctccagtatggcctcctgatttttggtgctgctgtctctgtccttctacaggaagtgttccgttttgcttactacaagctccttaagaaggcagatgagggcttagcatcactgagtgaggacggaagatcacccatctccatccgacagatggcctatgtttctggtctgtccttcggtatcatcagtggtgtcttctctgttatcaatattttggctgatgcacttgggccaggtgtggttgggatccatggagactcaccctattacttcctgacttcagcctttctgacagcagccattatcctgctccacaccttttggggagttgtgttctttgatgcctgtgagaggagacggtactgggctttgggcctggtagttgggagtcaccttctgacatcgggactgacattcctgaacccctggtatgaggctagcctgctgcccatctatgcagtcaccgtttccatggggctctgggcgttcatcacagccggaggctccctccgaagtatccagcgcagcctttcgtgtaaggactgactacctggactgatcgcccgacagatcccatctgcctatccactgcccatgactgaacccagccccagcccgggtccattgccctcatcctccgtctcctcgctgatgtgccccgcttccttccgggtttggcgttgtccatttgtgacctgtagtctctaagctttctcaggagcagcctgggtgcagccagtcagggactggtgggtttgaatctgcatctctccccaccacctggggacccccttgttgtccaggtctccccatgtgtcagtgctccaccctcaccctgcccatgactcaccccgcttcccctctgcaggccgccggcaggaggacagtcgggtgatggtgtactctgccctgcgcatcccacccgaggactgagggaacatgggggggcccctgggcctggggtgccctcccgatctcctcgtcccgtatttctccatctccagttctggacagtgcaggttgccaagaaaagggacctagcttagccatggccctggagatgaagttactgaggctgagggtagatgggttcagttcagtgtctcctgcccagactggacatcttggtctttttctcaggtctgaaaggaaccattttttggtatgataaagaccccaaaatgccttttttttaaagtggggagagggaggaggtacgccgggagcctctttaacctccataggctgtgtttgctcccaaatctgctgatggtggctcatttctatcctgttttccctttggtcccaggccctgggggaaaggaaggaagtgcatgcttggggactggtcccactggatctctatcctaacgtccatggccgtcagcacccctcctttccccaaggtgaaatggagggtgctgtgggggcctgcccactccatggcagtgccctgaaggagtcagactaccatggcatcgcaggcccagagggcagacattttttctagtttttaattggggtgtgggagggtttggggaggttttctatcactgtgttgtttttctgctgagggtggaatattctgtccttttaatcaaggtgattgtgattttgactaataaaaaggactttataattgtggggggacttggctttaagaggggtaatggattgagatttctagctccgggtggctccggtccatcctccctagccaagtgcctgtgatgttcaccattggtgtgatgagagaagcatcattagtggtgtaacttgtggaagttaacttcctagaagtaggtctcccttgtccaggaacaggatacaaggagttaattaatcatacccctgccccttctctttctctatgtctatctctgccactcaacagacagaggaactctcccactcttgaaagccacaaaaaaacattcaagaattaagatcaaaaacttttaatttccaaacatatattgagcaaaaaataattaaaatcccagcagcagcccttttttcctagaggaaaaaaaaaaactacaacgtatatctaagggagagaacatggcggtgtgaggtgaaagatggcagtttatcctcagcttcttccaaccaagcatgaggacagggaatctcctcatccacagctttgaaggccaaaggctcagcccttcctgaagagctggggtccctggtgtatagagagggttacctagcaggacacgtgcctgcctacaactggtcgtccagtgcctgcagccctcagagaggctccctggcaggaggagagggaggcatctgcagcatcttgagacagagttcacgcctctgtggtagcccgagcagaggtgaaaaccacacttttcctgtttcccagccgcttcttcctggaaaggggagcaatggttcatgggagtgactagcctcctaagtgagagtagacctagaataggaaatacatttaaaaaaaaaaaaaaa

SEQ ID NO: 70 - protein, 247 aa, Mus musculus
MGAAVFFGCTFVAFGPAFSLFLITVAGDPLRVIILVAGAFFWLVSLLLASVVWFILVHVTDRSDARLQYGLLIFGAAVSVLLQEVFRFAYYKLLKKADEGLASLSEDGRSPISIRQMAYVSGLSFGIISGVFSVINILADALGPGVVGIHGDSPYYFLTSAFLTAAIILLHTFWGVVFFDACERRRYWALGLVVGSHLLTSGLTFLNPWYEASLLPIYAVTVSMGLWAFITAGGSLRSIQRSLSCKD

SEQ ID NO: 71 - DNA, 2836 bp, Mus musculus
ggaccttcgtccggggtttcggcacccccccttccccttccccggggtccgggggtgacattgcaccgcgcccctcctggggttgcgtcctcgccccacgcggactccccctcggcgcgcagctccctttcgccttccttggccggggttccctcccttccccagctgcccagtcatgggggctgctgtgtttttcggatgcaccttcgtcgcgttcggcccagccttctcccttttcctgatcactgtagctggagacccacttcgggttatcatcctggtggcgggagcctttttctggctggtctccctgctcttggcttctgtggtctggttcatcttggtccatgtgacagaccgatcagatgcacggctccagtatggcctcctgatttttggtgctgctgtctctgtccttctacaggaagtgttccgttttgcttactacaagctccttaagaaggcagatgagggcttagcatcactgagtgaggacggaagatcacccatctccatccgacagatggcctatgtttctggtctgtccttcggtatcatcagtggtgtcttctctgttatcaatattttggctgatgcacttgggccaggtgtggttgggatccatggagactcaccctattacttcctgacttcagcctttctgacagcagccattatcctgctccacaccttttggggagttgtgttctttgatgcctgtgagaggagacggtactgggctttgggcctggtagttgggagtcaccttctgacatcgggactgacattcctgaacccctggtatgaggctagcctgctgcccatctatgcagtcaccgtttccatggggctctgggcgttcatcacagccggaggctccctccgaagtatccagcgcagcctttcgtgtaaggactgactacctggactgatcgcccgacagatcccatctgcctatccactgcccatgactgaacccagccccagcccgggtccattgccctcatcctccgtctcctcgctgatgtgccccgcttccttccgggtttggcgttgtccatttgtgacctgtagtctctaagctttctcaggagcagcctgggtgcagccagtcagggactggtgggtttgaatctgcatctctccccaccacctggggacccccttgttgtccaggtctccccatgtgtcagtgctccaccctcaccctgcccatgactcaccccgcttcccctctgcaggccgccggcaggaggacagtcgggtgatggtgtactctgccctgcgcatcccacccgaggactgagggaacatgggggggcccctgggcctggggtgccctcccgatctcctcgtcccgtatttctccatctccagttctggacagtgcaggttgccaagaaaagggacctagcttagccatggccctggagatgaagttactgaggctgagggtagatgggttcagttcagtgtctcctgcccagactggacatcttggtctttttctcaggtctgaaaggaaccattttttggtatgataaagaccccaaaatgccttttttttaaagtggggagagggaggaggtacgccgggagcctctttaacctccataggctgtgtttgctcccaaatctgctgatggtggctcatttctatcctgttttccctttggtcccaggccctgggggaaaggaaggaagtgcatgcttggggactggtcccactggatctctatcctaacgtccatggccgtcagcacccctcctttccccaaggtgaaatggagggtgctgtgggggcctgcccactccatggcagtgccctgaaggagtcagactaccatggcatcgcaggcccagagggcagacattttttctagtttttaattggggtgtgggagggtttggggaggttttctatcactgtgttgtttttctgctgagggtggaatattctgtccttttaatcaaggtgattgtgattttgactaataaaaaggactttataattgtggggggacttggctttaagaggggtaatggattgagatttctagctccgggtggctccggtccatcctccctagccaagtgcctgtgatgttcaccattggtgtgatgagagaagcatcattagtggtgtaacttgtggaagttaacttcctagaagtaggtctcccttgtccaggaacaggatacaaggagttaattaatcatacccctgccccttctctttctctatgtctatctctgccactcaacagacagaggaactctcccactcttgaaagccacaaaaaaacattcaagaattaagatcaaaaacttttaatttccaaacatatattgagcaaaaaataattaaaatcccagcagcagcccttttttcctagaggaaaaaaaaaaactacaacgtatatctaagggagagaacatggcggtgtgaggtgaaagatggcagtttatcctcagcttcttccaaccaagcatgaggacagggaatctcctcatccacagctttgaaggccaaaggctcagcccttcctgaagagctggggtccctggtgtatagagagggttacctagcaggacacgtgcctgcctacaactggtcgtccagtgcctgcagccctcagagaggctccctggcaggaggagagggaggcatctgcagcatcttgagacagagttcacgcctctgtggtagcccgagcagaggtgaaaaccacacttttcctgtttcccagccgcttcttcctggaaaggggagcaatggttcatgggagtgactagcctcctaagtgagagtagacatagaataggaaatacattt

SEQ ID NO: 72 - DNA, 2851 bp, Mus musculus; identical to SEQ ID NO: 69

SEQ ID NO: 73 - protein, 247 aa, Mus musculus; identical to SEQ ID NO: 70

SEQ ID NO: 74 - DNA, 3222 bp, Mus musculus
ggtcccggcccggccggcctggcgcatggaggcggccgcacgcctgcgggcgcggattgtgccttctgaagaccagggtgggattgatggagaagccccaggagggcagctctgactactgccgttcccaacaccgtgggtgctgccgctgaggagacctgtacacctctggccctcaccattgtccttgcctcccaatggcctctgctgccaggccggaggcagcactgctgcctgagcccgctgcccctcttcaggacttgccgttccctgatggggtaacgtgacagaccggatcagaggctgcctgcccaccacggcccagggccgctagagtttggttgagttcaagttcattttccctttggtcctgacttctggggcccaactctgaccaaaggggacactcctccgtccacccatgcagagagggtgtctccagcgacggccccatagaggacactgctctgcggccggagtcaccaacccgaagttctctctgctcagttttttttggttgttgttatttttattttgactccttgtaacttctccactctgagggacaggactttggcgctgcccgtcttgctgcggggtggggggagaagtgtgcttgtttcttttcttttttagaattggtttttttggaattatccgccacgaggcagcttcctctccctctcccaggtatttgcacaatatttgtgcggggcgtaggggcgaggttttaagaagtcttttctttgtggacaagcacggggatctcactggacttggtgtggggggctgggggaccccccgtgcagcccttgctggctagtcccctctgggtccccggaggaggcatggcccgcatgaaccggcctgcgcctgtggaggtgagctaccggcacatgcgcttcctcatcacccacaaccccagcaatgccaccctcagcacgttcatcgaggacctgaagaagtacggggctaccactgtggtgcgcgtgtgtgaagtgacctatgacaagacccccctggagaaggacggcatcactgttgtggactggccctttgatgatggagcgccccctcctggcaaagtggtagaggactggctgagcctgctgaaggccaagttctacaatgacccgggaagctgcgtagctgtgcactgtgtggcgggcctgggaagggccccagtgctcgtggctctcgccctcatcgagagcgggatgaagtacgaggacgccatccagttcatccgacagaagcgccgtggggccatcaacagcaagcagctcacctacctggagaagtaccggcctaagcagagactgaggttcaaagacccacacacgcacaagaccagatgctgcgtcatgtagctcaggccctggccctgtacctcattacatctgtgtctaaggagtccaacggctatgtgcgtccctgctctgtccccatctgtacccacggctgtctttctgaagctgtccctggaccctctgccagtcctgtccaacccctgtccctcaccccccactgcccaggccttccccctggcctgtgtattgcaggtgggagtttttaaaccactgggcccaatgcctcagcggcgtggccctcaccctaacctttttccagcacctttgttaccaggtgctctggactctcaaggcaataaatcaggagctgtggatgtgtgtgaagagtgttatagagcaggggaatagggtgtggatcccgggaggccatggtctccatctcttctgtcctattgctgctgctgctactgctgctgcagtggcgtgcctccatggcgccctctggtggccatcccttgctctgcctccctgacttgttctacaagttcttgacgcaaaaatcagcacagcttggactggtgacggtttgtaacattaggaggtgagactgatcacctctgcaggacagagtagggggtcacttggaactttcagtggcctccacccccgaccttcatgcaaccagaggtgtgggttgcaggtagatctgagtgtagatggcctttggtgacatgggtctgcctaggacctcatcctgcttataagttctgagcagtgggctgactcttcccttagctgaggaaagggtatcatgagggacagggctggctatatgtgtgtcttagccagggttttatggctgtgaacagacaccgggaccaaggcaactcttacaaggacaacatttagttggggctgccttacaggttcagaggttcagtctgtcatcaaggtgggagcatggcagcatccatgcaggcatggggcagctgtagctgagagctctacaccttcatctgaaggctactagtggaagactgatttccagggagctagaatgagggccttaaagcccatgcccacagtgacacacctactccaacaaggtcagacctccaaacggtgccactccccaggccagtcgtatttaaacagtgacaatgtgtcagtgtggatgtgctggctgtcttatagcactgacatacttaggacgtgatcctcaggcctttgcagacccagtcccctctgtgcccagaacagagatccagggcgcctctcactggtacctgctgcctgcttgcatcattccctcttcaagttccacctagctctggactaggtcccagaaaccatccgggcccacgtagactcccagcagtccctgttcttgcctgtcctagtagggagtgacaaggtgtagccaaactcagtaatggtgaccttgtgtgggctggaaactcactaccccggtgccatatttccacaaagtcactggtttttgtttttgttttagtctgccaagctttttttttttttaaaagatttatttattttatgtatatgaatatactgtagctgtacagatggttgtgagccttcatgtggttgtcgggaattgaatttaggacctctgcttgctctggtcaactccgctcactccggttcgccaatctctctcagtccttgctagcttcggcccaaagatttatttattatacataagtacactgttgctgtcttcagacataccagaagaggacgccagatctcattaccggtggttgtgagccaccatgtggttgctgagatttgaactcaggactttcggaagagccatctgaccagccccaagcttttttatttttattttttaaatctttaaatttaaaaaaaattattatttgtttgctgt

SEQ ID NO: 75 - protein, 173 aa, Mus musculus
MARMNRPAPVEVSYRHMRFLITHNPSNATLSTFIEDLKKYGATTVVRVCEVTYDKTPLEKDGITVVDWPFDDGAPPPGKVVEDWLSLLKAKFYNDPGSCVAVHCVAGLGRAPVLVALALIESGMKYEDAIQFIRQKRRGAINSKQLTYLEKYRPKQRLRFKDPHTHKTRCCVM

SEQ ID NO: 76 - DNA, 2590 bp, Mus musculus
gaactattttgcaaagggacgcgggtggagttcagctggagcgaagcctaacctcgaagggaccacgactgcgagtgtcgcggcctccggctgccccaggttctgcgaaccagcacccagccctgtcgcccgcccgcttgggcgcggctggatgcagcaggggtcccgcgccagcggccctcggccccgaacgcccggagtgcgcaggggcggcgtgcggggcccgagggcgcagcgccctccatgcgccgaggcgtacctcgagacacgccccgagacagcccggggcccgcactgcagccgccgcccgcgctaagccggggcgcggctcgcagccctagctctgcggcaacatgagccaagccgagctgtccacctgctcggcgccacagacgcagcgcatcttccaggaagcggtgcgcaagggcaacacgcaggagctgcagtcgctgctgcagaacatgactaactgcgaattcaacgtgaactcgttcgggccggagggccagacagcactacaccagtcagtcatcgacggcaacctggagctggtgaagctgttggtcaagttcggagccgacatccgcctagctaaccgcgacggctggagcgcgctacacatcgccgctttcgggggccaccaggacatcgtgctctatctcatcaccaaggccaagtacgcggccagcggccggtgatagccacccggactccggcccctggcccccacccgcgtcgtctctgctgtaccttcccgccaactacctcggtgtgcgccaggtttgctggtccgcgtggaaatcgggctaagtctctacgtccgcggccacgaccaaagtagcgcatccgtggaccccagggttcggctctccgcaaaagagcgcctccccttggcagtcctctgagccccgcggggccccagagccttcccacggccccgaccgcctagagggtgggggcggggcgcaggctccagtccgttttgaaatttgagtctcacaccgggagacttcggaatcccgagataccggatcctccgcttgaaatgttttctccggaaggtgaaaggcgcgggcggactcgcgctccagccgccgctcgtgagacccggccgctcacagtgcggcgcccgccgctggcagccgccaaacaaccattaccgggctccaccatctgcgcgccctcgcacttaggaagggaaggggacgctccgggttcctgatgtcctcaactatttatcacgtgtgtgtatatttgtgggtgaagtttgtgcgcctgagttttttgtttggaaatattgtgcgtggttatgggagaaagatgcattttttttcctttaaaactaaaaacttgagtctaccattttttggttgcactgaaaataccgcctagccctatggttttcccattgctagcccctcccccaccgagtccctaatcttccacacctcattcctcttttcctctccctggattctgagtttagagagcctaggatctgtctccctttcccctcccgtgagaggccaccattccccacacaggctggtttagcaaagttccaaagggctcttgaagcccgcgtggctgggacgtggggattctgagagcatggtacccttcctagtgacttctattatagttaatagtcggttgcacacttttttaaaaaagtaaatgaatttgccacgattaaatgtcataacatttatgacagaatataaaatattaacatattttaagccaagttttaggtgtatttttttgaatcttggttatgaacccaattttaaagggcgttgtatccagcgttgtgaaggctgttgtgtacccatatttatatttttataaaattcctataaagactgtgaatctctcatactattgctgaatgagtggaagggctgctgtgctctttctgccttccccaatccccatccccaccctcaaaccctgctccaaggccctattatgatctgaggatccagccatgagggaggggctgtgccaaggaccagggctggaggaggtgctggagcgtcactggctgtcccagaaaggagacttcctggtttctgtggttccaattttctatgcatctccattccccttcttgttttgatcctgggaaataaaagggaggctgaattattcaaatttaaatgaggtttccccttcgtagaagtgctgctgaccctgcgtgcaaaaatggggagcacttgaggacacaggtgggtggagccctttgtgccgcctggccatattcttcggtcttctgcgcttttatgaaccagtgtgggaggaatagtgataatgtcatgagaatggcagacactgagacaagcacagattacttcaaaaggagttctgtatggtttttctacacgcaaatgcctttttaattatgttaattaatgttaaaacgtactgggcctatgttgaagcttcagatgggtcctggttggtctcttctatctgtatgaagtctgtggcacactcctaagcgtacgatatagacttgtagcccatcgtgaaaaatttataaataaatttttcattggtctttttatattaaaaaaaaaaaaaaaaa

SEQ ID NO: 77 - protein, 114 aa, Mus musculus
MSQAELSTCSAPQTQRIFQEAVRKGNTQELQSLLQNMTNCEFNVNSFGPEGQTALHQSVIDGNLELVKLLVKFGADIRLANRDGWSALHIAAFGGHQDIVLYLITKAKYAASGR

SEQ ID NO: 78 - DNA, 4913 bp, Mus musculus
agaggtccaagttggagtctggcgggcagtgtggcccgcagagacttgcggagtggagggcagagccagggaggagtgagcatgtttcgggacccgacagccgggtggctaacaccgccatcaccgctatcgctgctggtgatgctgttgctgctgtcgcgagtcggggctctgcgtcccgacgagctctttccttacggggagtcgtggggagaccagctgctgccggagggcgacgacgaaagctcagcagctgtgaagctggcaatacccctgcgtttctacgatgcccagttcagcagcctctacgtgggcaccaacggcatcatctccacccaggacttccccagggagactcaatatgtagatgatgattttcctactgacttcccagccatcgcccctttcctggctgacatcgacactagtcacagcaggggccggatcctgtaccgcgaggacacctccggagctgtgctgagcctggctgcccgctacgtgcgcactggcttcccgctgtcggggtccagcttcacccccacccacgccttcctggccacctgggagcacgtgggcgcctacgaggaggtcagtcgcggggctgcgccgtcaggagagctgaacactttccaggctgttctggcatccgatgaatctgatacctacgccctctttctctaccctgccaatggccttcagttctttggaacccgccccaaagagtcctacaatgtccagctgcagcttcccgctagggtgggcttctgccgaggggaagcggacgacctgaagagagaagcactgtatttcagcctgactaacaccgagcagtctgtgaagaatctctaccagctaagcaacctggggattcctggagtgtgggcttttcacatcggcagcaggtttgccctggacaatgtccgtccagccacagttggaggtgacccttccacagcccgttcctcagcactggagcaccccttcagccatgctgcagccctggagagctacaccgaggacagtttccattactacgatgagaatgaagaggatgttgagtacccaccagttgaaccgggggaggccccggaaggccacagcagaattgatgtgtctttcaattcaaaggctgatccaggccttgtggacgtcggcacctcatctccaggttccgaccgcgcttctccttggccatatccagcacctggtaactggccatcctaccgggaaacagaatcggcttctttggaccctcaaaccaaacaggggcggccggtgggagagggagaggttctggatttcagggacccagcggagcttttggaccagatgggtaccagagccccagctcctccagaggcagatgcagctctcctaactccagtcaacgaagaccttgggggcagaaacacccagtcctatccagaggcagggccagtgccttcagagccagatgttcctgtccctcctctggaaggagaagtccttcctcattaccccgagtctggtcacgttccgcccctgagaggagggaagtatgtgataggactggaggaccacgtgggatctaatgatcaagtcttcacgtataatggcgccaacctggaaacctgcgaacacagccacggccggtgctcccagcatgccttctgcaccgactacaccactggcttttgctgccactgccagtcgaggttttacggaaacgggaagcactgcctgccagaaggggcacctcaccgagtgaatgggaaagtgagtggtcgcctccgagtgggtcacattcctgtgcacttcactgacgtggatctacacgcttacatcgtgggcaatgatggcagagcctacactgccatcagccatgtcccacagccggcagcccaggccctgctccctgtcctgcccattggaggtctgtttggctggctctttgctttggagaagccaggctctgagaatggcttcagcctcacaggtgctacctttgtccatgacgtggaagtcacttttcaccctggagaggagagggttcgtatcactcaaactgccgaggggcttgacccagaaaactatctgagcattaagaccaacattgaaggccaggtgcccttcatcccagcgaatttcacagcccacattactccgtacaaagagttttatcattacagggactcagtcgtgacgtcctccagttcccgaagtttctctctcacttctggttctattaaccaaacgtggtcctaccacattgaccagaacatcacttaccaggcgtgcaggcacgcccccagacacctggccatccctgccacccagcagctgactgtcgaccgggcctttgctttgtacagtgaggatgagggcgtgctgaggtttgctgtgaccaatcagattggccctgttgaagtggactcagcccctgttggagtgaatccttgctacgacggaagccacacctgtgacacaacagcaaggtgccacccgggaacaggtgtagactacacctgcgagtgcacgcctgggttccagggtgacggacggagctgtgtggatgtcaatgagtgtgccactggcttccaccgctgtggccctaattctgtgtgtgtcaacttggtgggaagctacaggtgtgaatgccgcagtggctatgaatttgcagatgaccagcacacttgtatcttgatcgccccacctcccaacccttgcctcgatggcagtcacacctgtgcccctgaggggcaagccaggtgcattcaccatggaggcagctcattcagttgtgcctgcctgccaggcttcattggcactgggcatcagtgttctgatgttgatgaatgtgcggaaaaccgatgtcatgaggcagctatctgctacaatacccccgggtccttctcctgccgttgccagcctgggtatcgaggggacgggtttcactgcacctctgacacggttccggaagattccatctcaggactgaagccctgtgaataccagcagcgctatgctcagacacagcacgcctaccctgggtcacggatccacatcccccagtgtgatgaccagggaaacttcgtgccactgcagtgccacggcagcactggcttctgctggtgtgtggaccgaaatggccacgaagtccctggcacgcagactccacccggctccaccccgccccactgtggaccacctccagagcccacccagaggcctcggactgtctgtgagcgttggcgggaaagcctgctggaacactacggaggcacacccagggatgaccagtatgtgccccagtgtgatgacctgggccacttcatccccctgcagtgccatggaaagagtgatttctgttggtgtgtggacaaggatggcagagagctacagggcacgcgctcacagccaggcaccaggcctgcatgcatacccaccgtcgctccacccgtggtccggcccacaccccggcccgatgtgactcctccatctgtgggcaccttcctgctctatgcccagggccaacagattggccacttgcccctcaatggcagcaggcttcagaaggacgcagcccggaccctgctgtcactgcatggctccatagttgtggggattgactatgactgccgggagaggatggtctactggacagacgttgctggtcggaccatcagccgtgccagcttggaggcaggagccgaacccgagaccatcattacctcaggtttgataagcccggaaggacttgccatcgaccacttccgtagaacaatgtactggacagatagtggcctggataagatagagcgggccgaactggatggttccgagcggaaagtcctcttccacacagatctggtgaatccacgagccatcactgtggatccaatccgaggcaacttgtactggacagactggaatagagaagctcctaaaattgaaacatcatctttagatggcgaaaacagaaggattctgatcaacaaagatattggattacccaatggattgacctttgaccccttctccaaactgctctgctgggcagatgcaggaaccaaaaaactggagtgtacactacccgatggaactggacgacgtgtcatccaaaaccacctcaattaccccttcagcatcgtcagctatgcagatcacttctaccacacggactggcggagggatggtgttatatcagtgaataaggacagtggccagtttactgatgagtttctccctgagcagcggtctcatctctatgggatcactgcagtctacccgtactgtccaacaggaagaaaatgaacactaaatgtataggaggatttcaagtttacaagaatcttgtcctaagaatatttgctacgaaggcaaagacagtggaaaaggaattggccattatgagctcttggcacacaagtgagcattttcagtgcagtgagactcaagtatattttgtgaaatgtatacctcaatctttactactgtatttttaaaaacaaaggttatcacaagtttaaaatagaattttaatcattgcttattaaatcaacttttgtaaacagttatttaaaaggccaaattcattcaacatagaaccaatgagagcaaagacactaaatctgatttttgtttgccatggattctacctggccaagaaaagtaaagcaaacagatggctatgagaactgattcctgaagcccactgaggcccgccacagacggaccatggggttggcccagcgaagtcctcagactttatttatactaaggtgctacaaagagtccccaagtgcctctacagaagtatccctcaaaagtactccgggtaaaacaccaaagatgcagcagttcttcaattttctatataattccaataaaatattttaaagctttaaaaaaaaaaaaaaaaaaaaaaaaaaaaa

SEQ ID NO: 79 - protein, 1403 aa, Mus musculus
MFRDPTAGWLTPPSPLSLLVMLLLLSRVGALRPDELFPYGESWGDQLLPEGDDESSAAVKLAIPLRFYDAQFSSLYVGTNGIISTQDFPRETQYVDDDFPTDFPAIAPFLADIDTSHSRGRILYREDTSGAVLSLAARYVRTGFPLSGSSFTPTHAFLATWEHVGAYEEVSRGAAPSGELNTFQAVLASDESDTYALFLYPANGLQFFGTRPKESYNVQLQLPARVGFCRGEADDLKREALYFSLTNTEQSVKNLYQLSNLGIPGVWAFHIGSRFALDNVRPATVGGDPSTARSSALEHPFSHAAALESYTEDSFHYYDENEEDVEYPPVEPGEAPEGHSRIDVSFNSKADPGLVDVGTSSPGSDRASPWPYPAPGNWPSYRETESASLDPQTKQGRPVGEGEVLDFRDPAELLDQMGTRAPAPPEADAALLTPVNEDLGGRNTQSYPEAGPVPSEPDVPVPPLEGEVLPHYPESGHVPPLRGGKYVIGLEDHVGSNDQVFTYNGANLETCEHSHGRCSQHAFCTDYTTGFCCHCQSRFYGNGKHCLPEGAPHRVNGKVSGRLRVGHIPVHFTDVDLHAYIVGNDGRAYTAISHVPQPAAQALLPVLPIGGLFGWLFALEKPGSENGFSLTGATFVHDVEVTFHPGEERVRITQTAEGLDPENYLSIKTNIEGQVPFIPANFTAHITPYKEFYHYRDSVVTSSSSRSFSLTSGSINQTWSYHIDQNITYQACRHAPRHLAIPATQQLTVDRAFALYSEDEGVLRFAVTNQIGPVEVDSAPVGVNPCYDGSHTCDTTARCHPGTGVDYTCECTPGFQGDGRSCVDVNECATGFHRCGPNSVCVNLVGSYRCECRSGYEFADDQHTCILIAPPPNPCLDGSHTCAPEGQARCIHHGGSSFSCACLPGFIGTGHQCSDVDECAENRCHEAAICYNTPGSFSCRCQPGYRGDGFHCTSDTVPEDSISGLKPCEYQQRYAQTQHAYPGSRIHIPQCDDQGNFVPLQCHGSTGFCWCVDRNGHEVPGTQTPPGSTPPHCGPPPEPTQRPRTVCERWRESLLEHYGGTPRDDQYVPQCDDLGHFIPLQCHGKSDFCWCVDKDGRELQGTRSQPGTRPACIPTVAPPVVRPTPRPDVTPPSVGTFLLYAQGQQIGHLPLNGSRLQKDAARTLLSLHGSIVVGIDYDCRERMVYWTDVAGRTISRASLEAGAEPETIITSGLISPEGLAIDHFRRTMYWTDSGLDKIERAELDGSERKVLFHTDLVNPRAITVDPIRGNLYWTDWNREAPKIETSSLDGENRRILINKDIGLPNGLTFDPFSKLLCWADAGTKKLECTLPDGTGRRVIQNHLNYPFSIVSYADHFYHTDWRRDGVISVNKDSGQFTDEFLPEQRSHLYGITAVYPYCPTGRK

SEQ ID NO: 80 - DNA, 3290 bp, Mus musculus
gctccggggctgcgggatgacgcctcctcctcccggacgtgccgcccccagcgcaccgcgcgcccgcgtcctcagcctgccggctcggttcgggctcccgctgcggctgcggcttctgctggtgttctgggtggccgccgcctccgcccaaggccactcgaggagcggaccccgcatctccgccgtctggaaagggcaggaccatgtggactttagccagcctgagccacacaccgtgcttttccatgagccgggcagcttctctgtctgggtgggtggacgtggcaaggtctaccacttcaacttccccgagggcaagaatgcctctgtgcgcacggtgaacatcggctccacaaaggggtcctgtcaggacaaacaggactgtgggaattacatcactcttctagaaaggcggggtaatgggctgctggtctgtggcaccaatgcccggaagcccagctgctggaacttggtgaatgacagtgtggtgatgtcacttggtgagatgaaaggctatgcccccttcagcccggatgagaactccctggttctgtttgaaggagatgaagtgtactctaccatccggaagcaggaatacaacgggaagatccctcggtttcgacgcattcggggcgagagtgaactgtacacaagtgatacagtcatgcagaacccacagttcatcaaggccaccattgtgcaccaagaccaagcctatgatgataagatctactacttcttccgagaagacaaccctgacaagaaccccgaggctcctctcaatgtgtcccgagtagcccagttgtgcaggggggaccagggtggtgagagttcgttgtctgtctccaagtggaacaccttcctgaaagccatgttggtctgcagcgatgcagccaccaacaggaacttcaatcggctgcaagatgtcttcctgctccctgaccccagtggccagtggagagataccagggtctatggcgttttctccaacccctggaactactcagctgtctgcgtgtattcgcttggtgacattgacagagtcttccgtacctcatcgctcaaaggctaccacatgggccttcccaaccctcgacctggcatgtgcctcccaaaaaagcagcccatacccacagaaaccttccaggtagctgatagtcacccagaggtggctcagagggtggaacctatggggccactgaagacaccattgttccattctaagtaccattaccagaaagtggtcgttcaccgcatgcaagccagcaatggagagaccttccatgtgctttatctaaccacagacaggggcaccattcacaaggtggtggaatcaggggaccaggaccatagctttgtcttcaatatcatggagatccagccctttcaccgtgcagcggccatccaggctatatcattggatgctgaccggcggaagctctatgtgacctcccagtgggaagtgagccaggtacccctggacatgtgtgaggtctacagcgggggctgccatggctgcctcatgtcccgagacccctactgtggctgggaccaggaccgctgcgtgtctatctacagctcccaacgatcagtgctgcagtccattaatccagcggagccacacagagagtgtcccaaccctaaaccagacgaggctccattgcagaaggtttccctggctcggaactctcgatactacctgacctgccccatggagtcccgccacgccacttacttatggcgccatgaggagaatgtggaacagagctgtgagccaggccaccaaagccctagctgcatcctgttcattgagaacctcacggcccgtcagtatggccactaccgctgcgaggcccaagagggctcctacctccgtgaggctcaacactgggagctgctgccagaggacagagcactggccgaacaactaatgggccatgcccgggccctggccgcctccttctggctgggggtcctgcccacactcatacttggtctgctggttcactagggcttctaggagctgggggcgccccaggcttctgtagcccaggagtactagaataatgtcacactcagccggccggcccggaagctccctgtccactgattcttccaggggtactgaataatccagtgggggacaaagggcctggagacgtctagccgcaggcggctgctggggcccaggtggggtagggacagtgagggactatagaaggaaggcgccgactgtgaagctgggccatcagcaactcaagactttatcttctcgagaatattttttcgaaatctcacacttgacttcatgcagtgatgcacctggcctgagagcccatcagcctggcagtgggctttgggaaggggagctgggaccccccatctctggaccttggggctgagtcctttgcgtccttccctgttccactgctgggtggccagtgtccctgcagacccgggctgctcctctgtacctccctcacagcctgggtcccaccggacagcgccttgcatgtttattgaaggatgtttgctttccggacggaagggcgggaaaagctctatttttatgttaggcttatttcatgtatagctacttctgactgcatctgtatgaaaataccaaaactacatgctggggttgggggggcgggtagagggagggtctgggaaggggggggctgatcccaggctggggctccctgggataggatcagagtccagggacaggcatgggtttgacgagagtggcatgagctggctctgccctgggagcccagtctgagggcatgagcctccagtgtggggggtggttacgggaggggtgggtgagggagacaggggagagcgaagaagaaaactgagccctaggttgatttgccgtggtcattttgaaggaggagccgggtccacagggggaggttccaggactctgcccttggcattgtgggttggggggcagggggagtctcctcccttcccctcagcccccttccccaggggctgtgcttccatgctcctaacctcccaccttcagctcaggacatgtcctaacttaggctaaactgtgaaaattcccgtggagatggcccaggccgagcttcccaagtgggcctcccagcccacagtccatagatttcagcagagagctgacccttctccagctgtgtctggggcagggcctggggccgggggccttccagcttccgtcccttatctcttctcaatgcactttaataatgtaacatattactaataaacaagctatttatttaaaaaaaaaaaaaaaa

SEQ ID NO: 81 - protein, 664 aa, Mus musculus
MTPPPPGRAAPSAPRARVLSLPARFGLPLRLRLLLVFWVAAASAQGHSRSGPRISAVWKGQDHVDFSQPEPHTVLFHEPGSFSVWVGGRGKVYHFNFPEGKNASVRTVNIGSTKGSCQDKQDCGNYITLLERRGNGLLVCGTNARKPSCWNLVNDSVVMSLGEMKGYAPFSPDENSLVLFEGDEVYSTIRKQEYNGKIPRFRRIRGESELYTSDTVMQNPQFIKATIVHQDQAYDDKIYYFFREDNPDKNPEAPLNVSRVAQLCRGDQGGESSLSVSKWNTFLKAMLVCSDAATNRNFNRLQDVFLLPDPSGQWRDTRVYGVFSNPWNYSAVCVYSLGDIDRVFRTSSLKGYHMGLPNPRPGMCLPKKQPIPTETFQVADSHPEVAQRVEPMGPLKTPLFHSKYHYQKVVVHRMQASNGETFHVLYLTTDRGTIHKVVESGDQDHSFVFNIMEIQPFHRAAAIQAISLDADRRKLYVTSQWEVSQVPLDMCEVYSGGCHGCLMSRDPYCGWDQDRCVSIYSSQRSVLQSINPAEPHRECPNPKPDEAPLQKVSLARNSRYYLTCPMESRHATYLWRHEENVEQSCEPGHQSPSCILFIENLTARQYGHYRCEAQEGSYLREAQHWELLPEDRALAEQLMGHARALAASFWLGVLPTLILGLLVH

SEQ ID NO: 82 - DNA, 2249 bp, Mus musculus
cccacgcgtccgcccacgcgtccgcccacgcgtccgctcctccccgcgtgcaccatggatcgcaccttctagagtcttaactcagttctggaggaccaacatcccccggatctgcacttcaggaggtctctgctcccgggatgcgagagcctgggaccagcccgccctgtgcggagttccagccgcagccgggagcgcaaacccgagtcttctaggaggacgcgtgtggaggaaaggagccacaggttcaggcaggtgcataggcgggctatggtgaaaggaagatgttggccaggaagagcatcatcccggaggagtatgtgctggcgcgcatcgcagcggagaacctgcgcaaaccgcgcatccgcgaccgtctccccaaagcccgcttcatcgccaagagcggagcctgcaacctggcacacaagaacatccgagagcaaggtcgcttcctgcaggacatcttcaccaccttggtagacctgaagtggcgtcacacgctggtcatcttcaccatgtccttcctctgcagctggctgctctttgctatcatgtggtggctggtggccttcgcccacggggacatctatgcttacatggagaaaggcaccatggagaagagtggcctggagtccgctgtctgtgtgaccaatgtcaggtcattcacgtctgcgtttctcttctccattgaggttcaagtgaccattgggttcggagggagaatgatgactgaggaatgccctctggccatcacggttttgattctgcagaacatcgtgggtctgatcatcaacgcggtcatgttgggttgcatcttcatgaagacggcgcaggcccacagaagggcagagacgctgattttcagccgccatgctgtgattgccgtccgcaatggcaagctgtgcttcatgttccgggtgggtgacctgaggaagagcatgatcattagcgcctcggtgcgcatccaggtggtcaagaaaaccacgacgccagaaggggaggtggtgcctattcatcagcaggacattcctgttgataatcccatcgagagcaataatatcttcctagtggccccattgatcatctgccacgtgattgacaagcgtagccccctgtatgatatctcagcaactgaccttgccaatcaagacctggaggtcatagtgattctcgagggcgtggtagaaaccacaggcatcaccacacaagcgcggacctcctacattgcggaggagatccagtggggacaccgcttcgtgtcaattgtgactgaggaggagggcgtgtactctgtggactattccaaatttggtaacacggtgagagtggctgcgccaagatgcagtgcccgggagctggatgagaagccttccatcctgattcagaccctccaaaagagtgaactgtcgcaccagaattctctgcggaagcgcaactccatgaggagaaacaactccatgaggagaaacaactccatcaggaggaataactcttccctcatggtgcccaaggtgcagttcatgactccagaaggaaaccagtgtccatccgaatcatgagggcaggatgaccggagacagttacttgttgagtcctgatgactgatagccctgaacagtcagtcactcactgtgtcctgatgactgagagacaatccggagacagttcattgagttccgatgatcaaaatattgcactcatcaccagttcagggctggagcacagtattcctatcctaatgcactgagaaatattcatatttgagacattaaacttcctgtactaataaacaataacacacaaacccgagctctttattctcctctcatcttaaaattctgttttcttcccagcagtctctgtagtcaggtcagttggcctgtgtttttgagcttctgtcatttagcagagatgagatcttctacccaagcccagtttcgtcattcttaggtcctgcaccctaaagtaagggcagagtagagagacgtcctgggttaacacggtgtgtgatgtggggttaacccagtgtgtgatatgggggtaacacgttgtgtgatgcggtaaaacatggaagctgggcagctgggtagccttttattcagagtctggggcttgaattcatttttttacatgagccattgaaccacacgggtcatcatgaatatgttcaaatctaaccttcaaagactcaggttgctaaccaagcaaatagcacctgctgggttaattattccaaaaaaaaaaaaaaa

SEQ ID NO: 83 - protein, 424 aa, Mus musculus
MLARKSIIPEEYVLARIAAENLRKPRIRDRLPKARFIAKSGACNLAHKNIREQGRFLQDIFTTLVDLKWRHTLVIFTMSFLCSWLLFAIMWWLVAFAHGDIYAYMEKGTMEKSGLESAVCVTNVRSFTSAFLFSIEVQVTIGFGGRMMTEECPLAITVLILQNIVGLIINAVMLGCIFMKTAQAHRRAETLIFSRHAVIAVRNGKLCFMFRVGDLRKSMIISASVRIQVVKKTTTPEGEVVPIHQQDIPVDNPIESNNIFLVAPLIICHVIDKRSPLYDISATDLANQDLEVIVILEGVVETTGITTQARTSYIAEEIQWGHRFVSIVTEEEGVYSVDYSKFGNTVRVAAPRCSARELDEKPSILIQTLQKSELSHQNSLRKRNSMRRNNSMRRNNSIRRNNSSLMVPKVQFMTPEGNQCPSES

SEQ ID NO: 84 - DNA, 646 bp, Mus musculus
aaaccaacaagttatattatctttattcatgttagaatttctatcagtgtttgaacattaatatttagagagttttgtacattttcatctgagaaccgcactaggtcaccatgttcacaccgatactttccaatcacatggatcactgctcacgtgtactctcctaacactgttaaagcatactctcttctctcccttgctgtcatttataacgaaacgtgtcctcacacccatgtctcagcaaagttccagacattatggatttcatcacatataaattctttaaaaatatacttctgtcgaaagacttgatgactactatgtacactacaaaaataaattttcatataaataaattatatggcatactttcatctttgtaattgaagtgacacaaactcatttccacccaaattggcagacgagacccagtttgaatatttatttcctttaaactccttacactaaaacctaccatgagtccttaatgtaaatgttatatactctgaactatttaacattagtaagcactctatacaaataaaacttctgttcaaaagtaaagcataactgcaataagtgtttccaatagaaataaaatccctgcaattttttcttcttgttataaactggcatgacaaattcg

SEQ ID NO: 85 - DNA, 7656 bp, Mus musculus
gagggccatggacctgcttaatagaaacaggcttgtaattgtgagtccgcgccgcactccgccgaaagcctgcggcggccccgcgcgccggggtttttacactttccgttccttttgtaaagacggaggaggaggagaagacgaagacgaagacggggggggggggaaaagagaaggcgacagggcagacaaagagacccgcggcgacagggcctgggggagaagaagagagacagggagaagagagagccacgcagcaccagccaaggggggccccgggaaattaataaaaggaattgatgtgaacctcacggtcagcgtccgcgccatcggcagctgcgctccggccaggggctgaggccggctatggggaaggctactggccggaaagcgccgctgtggctgagagcgaagtttcagagactcttatttaaactgggttgttacattcaaaagaactgcggcaagtttttggttgtgggtctcctcatatttggggccttcgctgtgggattaaaggcagctaatctcgagaccaacgtggaggagctgtgggtggaagttggtggacgagtgagtcgagaattaaattatacccgtcagaagataggagaagaggctatgtttaatcctcaactcatgatacagactccaaaagaagaaggcgctaatgttctgaccacagaggctctcctgcaacacctggactcagcactccaggccagtcgtgtgcacgtctacatgtataacaggcaatggaagttggaacatttgtgctacaaatcaggggaacttatcacggagacaggttacatggatcagataatagaatacctttacccttgcttaatcattacacctttggactgcttctgggaaggggcaaagctacagtccgggacagcatacctcctaggtaagcctcctttacggtggacaaactttgaccccttggaattccagaagagttaaagaaaataaactaccaagtggacagctgggaggaaatgctgaataaagccgaagttggccatgggtacatggaccggccttgcctcaacccagccgacccagattgccctgccacagcccctaacaaaaattcaaccaaacctcttgatgtggcccttgttttgaatggtggatgtcaaggtttatccaggaagtatatgcattggcaggaggagttgattgtgggtggtaccgtcaagaatgccactggaaaacttgtcagcgctcacgccctgcaaaccatgttccagttaatgactcccaagcaaatgtatgaacacttcaggggctacgactatgtctctcacatcaactggaatgaagacagggcagccgccatcctggaggcctggcagaggacttacgtggaggtggttcatcaaagtgtcgccccaaactccactcaaaaggtgcttcccttcacaaccacgaccctggacgacatcctaaaatccttctctgatgtcagtgtcatccgagtggccagcggctacctactgatgcttgcctatgcctgtttaaccatgctgcgctgggactgctccaagtcccagggtgccgtggggctggctggcgtcctgttggttgcgctgtcagtggctgcaggattgggcctctgctccttgattggcatttcttttaatgctgcgacaactcaggttttgccgtttcttgctcttggtgttggtgtggatgatgtcttcctcctggcccatgcattcagtgaaacaggacagaataagaggattccatttgaggacaggactggggagtgcctcaagcgcaccggagccagcgtggccctcacctccatcagcaatgtcaccgccttcttcatggccgcattgatccctatccctgccctgcgagcgttctccctccaggctgctgtggtggtggtattcaattttgctatggttctgctcatttttcctgcaattctcagcatggatttatacagacgtgaggacagaagattggatattttctgctgtttcacaagcccctgtgtcagcagggtgattcaagttgagccacagcttcgcccacgaaacccatatcactatgcagtccaccgttcagctccgcacagagtatgaccctcacacgcacgtgtactacaccaccgccgagccacgctctgagatctctgtacagcctgttaccgtcacccaggacaacctcagctgtcagagtcccgagagcaccagctctaccagggacctgctctcccagttctcagactccagcctccactgcctcgagcccccctgcaccaagtggacactctcttcgtttgcagagaagcactatgctcctttcctcctgaaacccaaagccaaggttgtggtaatccttcttttcctgggcttgctgggggtcagcctttatgggaccacccgagtgagagacgggctggacctcacggacattgttccccgggaaaccagagaatatgacttcatagctgcccagttcaagtacttctctttctacaacatgtatatagtcacccagaaagcagactacccgaatatccagcacctactttacgaccttcataagagtttcagcaatgtgaagtatgtcatgctggaggagaacaagcaacttccccaaatgtggctgcactactttagagactggcttcaaggacttcaggatgcatttgacagtgactgggaaactgggaggatcatgccaaacaattataaaaatggatcagatgacggggtcctcgcttacaaactcctggtgcagactggcagccgagacaagcccatcgacattagtcagttgactaaacagcgtctggtagacgcagatggcatcattaatccgagcgctttctacatctacctgaccgcttgggtcagcaacgaccctgtagcttacgctgcctcccaggccaacatccggcctcaccggccggagtgggtccatgacaaagccgactacatgccagagaccaggctgagaatcccagcagcagagcccatcgagtacgctcagttccctttctacctcaacggcctacgagacacctcagactttgtggaagccatagaaaaagtgagagtcatctgtaacaactatacgagcctgggactgtccagctaccccaatggctaccccttcctgttctgggagcaatacatcagcctgcgccactggctgctgctatccatcagcgtggtgctggcctgcacgtttctagtgtgcgcagtcttcctcctgaacccctggacggccgggatcattgtcatggtcctggctctgatgaccgttgagctctttggcatgatgggcctcattgggatcaagctgagtgctgtgcctgtggtcatcctgattgcatctgttggcatcggagtggagttcaccgtccacgtggctttggcctttctgacagccattggggacaagaaccacagggctatgctcgctctggagcacatgtttgctcccgttctggacggtgctgtgtccactctgctgggtgtactgatgcttgcagggtccgaatttgatttcattgtcagatacttctttgccgtcctggccattctcaccgtcttgggggttctcaatggactggttctgctgcctgtcctcttatccttctttggaccgtgtcctgaggtgtctccagccaatggcctaaaccgactgcccactccttcgcctgagccgcctccaagtgtcgtccggtttgccgtgcctcctggtcacacgaacaatgggtctgattcctccgactcggagtacagctctcagaccacggtgtctggcatcagtgaggagctcaggcaatacgaagcacagcagggtgccggaggccctgcccaccaagtgattgtggaagccacagaaaaccctgtctttgcccggtccactgtggtccatccggactccagacatcagcctcccttgacccctcggcaacagccccacctggactctggctccttgtcccctggacggcaaggccagcagcctcgaagggatccccctagagaaggcttgcggccacccccctacagaccgcgcagagacgcttttgaaatttctactgaagggcattctggccctagcaatagggaccgctcagggccccgtggggcccgttctcacaaccctcggaacccaacgtccaccgccatgggcagctctgtgcccagctactgccagcccatcaccactgtgacggcttctgcttcggtgactgttgctgtgcatcccccgcctggacctgggcgcaacccccgaggggggccctgtccaggctatgagagctaccctgagactgatcacggggtatttgaggatcctcatgtgccttttcatgtcaggtgtgagaggagggactcaaaggtggaggtcatagagctacaggacgtggaatgtgaggagaggccgtgggggagcagctccaactgaggtgtgtgccagaggtatccccgtggtgcttccaagggccatctgagcggtggcccaaactagaccctgggggaccttttattcccaaggcaaagctgacgaggccaaactcatccttagagtaacaataccgttctaaactggatctccccccccccccaccctgctattaatcccttagaatgccagtttaatagtttaaccttgtacctgtttgctgggcacttacagcagagttctaacaaccatgcagatgactttacagggtggggaaaaaaatgatgaaatgagtttagcaccccagtcagagtttcagggctctcagctgcccactgggagtaaagagctgtgctgtgtaaggctcacagttcagtgtggtagtgaccataatgtgacctccttttttgttctcttttaaagggtaattaaaatctgaagcaaagaggccaaagattggaaagccccgcccccacctctttccagaactgcttgaagagaactgcttggaattatgggaaggcagttcattgttactgtaactgattgtattattttgtgaaatatttctataaatatttaaaaggtgtacacatgtaatatacatggaaatgctgtacagtctatttcctggggcctctccactcctgccccagagtggggagaccacaggggccctttcccctgtgtacattggtctctgtgccacaaccaagcttaacttagttttaaaaaaaatctcccagcatatgtcgctgctgcttaaatattgtataatttacttgtataattctatgcaaatattgcttatgtaataggattatttgtaaaggtttctgtttaaaatattttaaatttgcatatcacaaccctgtggtaggatgaattgttactgttaacttttgaacacgctatgcgtggtaattgtttaacgagcagacatgaagaaaacaggttaatcccagtggcttctctaggggtagttgtatatggttcgcatgggtggatgtgtgtgtgcatgtgactttccaatgtactgtattgtggtttgttgttgttgttgctgttgttgttcatttttgtgttttttgttgctttgtatgatcttagctctggcctaggtgggctgggaaggtccaggtctttttctgtcgtgatgctggtggaaaggtgaccccaatcatctgtcctattctctgggactattcaagagaagccagatttgcttcatgcctgtgtgtggcagcttctgaggtcatgggtagccctccaagcacctctgcttgggtttcaaagagaagatgttctcacaaacattgtgctgcctattagggcctctatatagtcagcagtcagcactagtggtgaaagattggacaatgttgcctgatggtgagactcagccgggtcatgagattaccctctaggggtgtgtggttgttcctttctgatgatcacacatacacacagcctcccacccccatactccagatacaggcccaaaaaaacctatttcactgaaggtctatattcgagcctttacaaatgatagtccctcccttgctatgactgcctggttggagcaggctaggctaatcgtggttcagtcaactgtgtggggagagtttctaaggactcttttccacacggtcttttcctgtgtatactttcttctcttccccactgttagcatccatccagtgtgatgtctgtgaaagcaggaagatgccacctcgtaaaagcatatagggtaagctctttgaaccaggtgttgggctttagagtttgattgtgttctccttccccaaggtttgggtttctttgtctctggtcagcaactagtagatagggaaggaaatgcccttattccttgcaagtgaacattgaggacttgtctcagaggaaggaagcctagtgctcatggaagctgttgtgaggaatgtactctgtctgcatgcagcttccctgaatccctcctatccttcatggaaaaatttaaggagatgggtccctagtagtaccaataatctagtgccctcagatcctaaaatttatcccccaaattgtaaggtactaattggaagccacctgtgactaccgtgtgtgtgtgtgtctgtgtctgtctgtatatccgtgtgcgcgtgcgcgccagaagccctggccatccactgctactgtcttaatgcctgtcaagccactgtctgcctacccaacaccagctctgctcggatatcttgcaccctgagttgaggagggagatgtagagtgcggaagccaccttggctgtggttcttgattgtgtccctcatgcctgagccttgtgcatgtggcagaaggaagtttgtacagcctctcggcttctgtgcatcatcatgagtcccatcagccaaggcaggaaggacacagagctggcaggagactaaagtcagagagtgtgtgtctctgtctgtctctctcatagttttattttgtctgtattgtttgttcatttggatgttttaatttgtaaaagaaaagatctttgctgatatttataattttgtatcataagaatgtcctccagaatttgtcatgccagtttataacaagaagaaaaaattgcagggattttatttctattggaaacacttattgcagttatgttttacttttgaacagaagttttatttgtatagagtgcttactaatgttaaatagttcagagtatataacatttacattaaggactcatggtaggttttagtgtaaggagtttaaaggaaataaatattcaaactgggtctcgtctgccaatttgggtggaaatgagtttgtgtcacttcaattacaaagatgaaagtatgccatataatttatttatatgaaaatttatttttgtagtgtacatagtagtcatcaagtctttcgacagaagtatatttttaaagaatttatatgtgatgaaatccataaggtctggaactttgctgagacatgggtgtgaggacacgtttcgttataaatgacagcaagggagagaagagagtatgttttaacagtgttaggagagtacacgtgagcagtgatccatgtgattggaaagtatcggtgtgaacatggtgacctagtgcggttctcagatgaaaatgtacaaaactctctaaatattaatgttcaaacactgatagaaattctaacatgaataaagataatataacttgttggttt

SEQ ID NO: 86 - DNA, 1016 bp, Mus musculus
ccgagagatctgagagcactgagcgcatctgggcattattgcagtgttcaccggagacagatcgtagaggcggggctctgccacgtccatcctggaaacttgataatcaatgactctctaggagttggaaatccggggactcaaggaagagaaacaaaacaccagtgtttctgtctgtgcccatttggaaccaagagatgcaccttgcaaggaactgaggggttgtgggacatccacgaagagatcctcaaagatgtctcagagccagcagagtctctgaactgtttgatcacattccagctcttcccatacctcaatatctgttgctatggagacttccaacgggactgagacctggtacatgagcctccatgctgtgctgaaggctctgaacacaacccttcacagtcacttgctctgccggcctgggccaggaccagggccagacaatcaaactgaggatcgtcgggctagccttcctggtcgtaatgacaactcctacatgtatattctctttgtcatgttcctatttgccgtcactgtgggcagtctcatcctgggatatacccgttcacgcaaagtggacaaacgtagtgacccctatcatgtgtacatcaagaaccgtgtgtctatgatctgatgtgaggaacctgaagacaatggaagattacaatgtctgaggattgtcttctggtgcctccggaactcaactcaaccatatcaagccacagtgtatctatgtaagatcaacaggaaactggtaagaggattaggtcattattaggaccagagaagagggactgataggcccagtcttgtggatgagacatttttcgagacacagatgcgcattataaactcagagcccatgaacacatatatataaagtatggacaaccagcaagtagaagaggaagctgtggcgaagggaaatggggcagaaagatgctctggatatataatcttttaatgtatgatcttcaacatgagaaaccttgataaaactgagaatgctc

SEQ ID NO: 87 - protein, 103 aa, Mus musculus
METSNGTETWYMSLHAVLKALNTTLHSHLLCRPGPGPGPDNQTEDRRASLPGRNDNSYMYILFVMFLFAVTVGSLILGYTRSRKVDKRSDPYHVYIKNRVSMI

SEQ ID NO: 88 - DNA, 3148 bp, Mus musculus
gaagcattctctctaacagcctggaccaacgggtagttgggagtcgcgggcagagcagcgtcagccacttagagagtttttgccgccgacccgaagccaccaaggccagcttcgcggcgctgccccgcggcggcagagaaggctgcaccaagagcagaggcagcgagcaggagtggggcaggcagccagcggtgcggctggggcgctcaccctcccgcggtccgggagccacgcgagctccgtgcccgcacgcgccagccccggctcgcgcctttctttgcgtccgggtgccctgcctctccgcccactcgccggctcctctgggctgccgcggaccgagttgcagcatgaatctgaggctctgcgtgcaggcgctgctgctgctctggctctccttgactgcagtttgtggagtgccactgatgttgcctccagatggaacaggactagaagaaggaagcatgcgctacctggtgaagcccagaacttcgaggactggaccaggagcctggcagggaggcaggaggaaatttcgcagacagcgcccccggctctcccataagggccccatgcctttctaaagcaggattgaagggctcgccaagtgccctcccggtgccggtctctctactccacagatgaattctcttctctggaaccctcacatctatttggctttcatcttgcacctgttctagctgctgatggtcccggctcttctcacccaccaagttcctctaatggcgtggtctcgcccctcacttggatgatttcattcctctcacaaggatccctttggcccatcctcctggccactctttggactgcccttggagacccagcttctccttgacctgttccatgcggtagtccctatctttcagccgtagccttctcttggctcttccctcttttcatttgccttgggcactggacaagaacactcccttctccagtggattccagcacatccatgctttcttatcaattggacctcttgcctggaagggagcgccgagatgtgcaatgagacttcggttgagaggggttgggtgttggggtccagataaggtgcactggggaaactgaatggtgggcgtgaggaaggggtgtggcgaaatagctgccacagcctcttccttagctctctctggccctgttaaaggaagacgcaaaggaaaggagcccatgaagttctatgtcaccgtgccttctaatgtcttcgctctctctgttctattgcagcttgttcagtccccaggtcagaaggggagagtgtggatcctgacatggttctatactcttctgggggtaattttgccaaaaaaataatcccaaccaatcaaccaaccaaccaaataacccacagaaagtcagagcccaaaggacccttgaagatcacttagctcccttatgcaaaagcttgcacaaataggccctggagagggaagtaacctgcttagagccactgcagagccccacagggcaccagggccctcaactcccactttatgatgccctttttcctcttgatgatgtcctttcaaagcaaatgaagtgccttttgctgggtttagtgaagcgggtggctaggaaggaagagcagggagagacaagccagctgtgaactgctttgtgtgagaatggagcatctccctcccaacgtggcccggaatagtccctaagtggtgaaatgtaccccacacaggcctattcccaggctcatgccattttaattggggttctcaggcactgaaactaccatttagcccctgacactggttgtcatgaacccctgtgttgactgcgcccttgatcttggggcttttgggggatggagaaaggcaaagaaaggaaggagaggtggaagaaggaaggagagatgggaggatgtgtaggtgggatctatcactccaccaagggggtctcatctctcaccaggagccttttgtagcccttccctgaagggagaccctcatcttctctgcctgagcacatgttcttctcagaggcctctcaggagggagaaaagagaagacagaagctcgatattcacttatatatgtgtagggtagggggagtcaggacccccaagccccataataacctgattgcctattcatcctttcccaaagccttcctatctgctgctgctaatgctgctgctgctgcctctgctgccgtttcaaggcccaccctggggagcagggccaggcatagcgtcctcacctcttgggctagaagtgggagctggctggcgcctcttctactgctggtacccctaccagggaccgggccttctccgtctttgtcgtttctgcacctcctgccttatcagcctgccatggccagccccacagggaaagggaggggggaatattggctgagaaagaggagagatagaagcacaagaggggagtaaacgggcccagtgggctgtcttatttaaagtggttatgtgtatttcttatactaatttatatagagatattaaggccctttgagttagagaaactgtccccttcccataagtgtgttcgctatgtttgtaaaaattgttccatgtaaatatgtctttataataaagagttaaaagttgacagtttgcccttactctttgaggtcatattcaggagggcattctttttctcctagggccaatcttgtccctgtgcccacagattgcacgtgtagggaggtgagtgcttgtatcccaaattggttctaggtcaactggcctcaaactgatttgccacaagctcacaaaaagactcgctatgcttaagggccagttcacataaatttgagccccttttaagtcctttggcatctgttcgaatgtcctcatttttctggcagtgtcacttaaaggattttttttccagaagcaattcatttaaggacacgctgatcaaaggtgggatttgtactaaacgctgttttgtagccctggtgggtgccttctgttttatctgcttttgaatactttcgggactttttagccagtttgcctttcttgacaaatgttgtcctcagccataaatacatttggtaatgactttgtatgtatcgttttattgtttcacaaagtggagttgcttgatgaatgagataacctggaaaataaacttcgaggagttcgatagga

SEQ ID NO: 89 - protein, 77 aa, Mus musculus
MNLRLCVQALLLLWLSLTAVCGVPLMLPPDGTGLEEGSMRYLVKPRTSRTGPGAWQGGRRKFRRQRPRLSHKGPMPF

SEQ ID NO: 90 - DNA, 4257 bp, Mus musculus
ggattgtgcggcttttttacccctcgggaaaaaaaagaacagggagtggaaaggaagagaaggcaaagcgaagaactcctcgggcgcgctctgcactccgagccacggctgggcgcggggacgctgctgccaccgccaccgccgactcgctctctccccggccctgcagcgtgtgccagtgggagcgcgagccagggcactcgattctggggacacagagagacttttggccgccactgccgcggcaggcagaagagacagcggcgagaagggccctgccaccgcctttccctcctccgccgccccggccggcccgctcaagcggccaggcacagggaagcagggaggagcagaggcccaggagaagcgcgccgcggctcgcccgcccgtggatgcggcgcccgggggagcctggagacaactttgccgggtgacgcgctgggaggactgcagggcccgccgcccaggagggctcggcacctcctgtaagaagggcccgcgcagcggcgctcccccgcacagctctctctcctcccgccggcccggagcaggggagaaggacctgcccatcaccgccgctgcctcgggcggccgtgtcctcgctgcgagcagcgacagggcgaggcgctcaggtgcggtcgcggggccccagccgcagcgccctccgcagcgccgcgcccggggtctccggcaccttcgcttcagtctccagagcgacttgcgcccgctgccgcctcttccctccacctttccagcccggccgagccaagccaccgtgccagcaccgctgctgccgctcctcgctttcgcttcaccccgatcagggggctgcggtggccctcgacgcggagaggatgggcaggctgcagatgcctaggcgccccgagtcgtcagcgcgccactgacccggcggtcccccccaccccctcaccgccagcccgcgttcccttctggtccccgcggcgccccttctcggccgcgcgggaacccccgcggcccggccggccccctccccctgcgagccggcggcggcgctcccggcaggcgggcgggcggaggcccgggcgggggcggggcggggcggtgcgcccagagcccggagcccggccctgagctcgcttcgcctcgcctcgcggcgggcgccctcgtcgccagcggcgcaccatggacgggctgcccggtcgggcgttgggggccgcctgccttctgctcctggtggccggctggttgggacccgaggcctggggctctcccacacccccgccgtcgcccgctgcgccgcccccgcccccgccacccggagctccgggtggctcgcaggacacctgtacgtcgtgcggtggcggcggcggcggcttccggcggccggaggagctgggccgggtggacggtgacttcctggaggcggtgaagagacacatcttgagccgcctgcagttgcggggccggcccaacatcacgcacgctgtccccaaggccgccatggtcacggccctgcgcaagctgcacgccggcaaggtgcgcgaggacggccgcgtggagatcccgcacctcgacggccacgccagcccgggcgccgacggccaggagcgcgtctccgagatcatcagctttgcagagacagatggcctcgcctcctcccgggtccgcctgtacttcttcgtctctaatgaaggcaaccagaacctattcgtggtgcaggccagcctgtggctgtacctgaaactgctcccctatgtcctggagaagggcagcaggaggaaggtacgggtcaaggtgtacttccaagaacagggtcacggagacaggtggaatgtggtggagaagaaggtggacctgaaacgtagcggctggcatacctttcccatcacagaggccatccaggccttgtttgagcgaggggagagacgccttaacctggatgtgcagtgtgacagctgccaggagctggccgtggtgcctgtgttcgtggaccccggtgaggagtcacacaggccctttgtagtggtgcaggcccgcctgggcgatagcagacatcgcatccgcaaacggggcctagagtgtgatgggcggaccagcctctgttgcaggcaacagttcttcatcgactttcggctcatcggctggaacgactggatcattgcgcccactggctactacgggaactactgtgagggcagctgcccggcctatctggccggggtccctggctcagcttcctccttccacacagccgtggtgaaccagtaccgcatgcgtggcctgaaccctgggcccgtgaactcttgctgcatccctaccaagctgagctccatgtccatgctctactttgatgacgagtacaacattgtcaagcgggatgtgcccaacatgatcgtggaggagtgtggctgcgcctgacagaggcaacgggggcggagcacaggcccatgggtctttgagggagcaggagaggcaggtgggctgagtgtggttgttccattgggccgtgaagagtgccagggtgaggcctgaaataatgttctcccgctttgtagaaaaccagtcaggaccagagggagaatccctctgtggcacgagagactcctaactgcacacatagacacgcatagccagactcacgcagtctgccacccacacagcagcctctgggataccagcaaacggatgcggtgacaaatggcaccaatgcctgtcagtctgaaagaatggggtgagcagccaccattcccaccagctggccgggcactctgaattgcgccttctgagcacacataaaagcacacaaagacagaggacacagagagagtgagccagagagccaccaagaggaaaagcagggtgggagcacaggcgggtggagggccatgtgtccctgacttgtcccaggttcttcaccgaagcgcctggcacagtcctgcctgctcactgcccgcctggcatcctccatgctttgaggccagcagagctgtgccacccctgttcttggagagggcaagtagcccaggagcgactcacctgtcacagagaccatggagcagggacagtgaccctttgatggtctgtcacttgcgtcccccatgtgacttatatatgtgtgtatgtgtgtttgttttcgggggtgttgggggagggagagaagaagggtcttaattttatgctttaaattcatctccaacaactgacaggtcactggtgccagttgcagaattgaaaagagcctatcagctatggcctttgaagcggaaaggccaaacgattcgaagtgagaaggaaagaaaaatgttgcaatcggtgccctttgctggggacttcctcctggtgttatgcttagaggggagggccactggcaagggggagagacaggggaggcagtggcagagtgaggctgttctgaggagctgctcagctgggcttggagagagagggagagcttttggttgctttgcagaagttgttcccgagggtgagccctggcttcagggttgtccgtggacatgtcccctgcccagttcacttgccctcccgcctgctccacaatgcacttgcggtcctgagtgaatgcacaccacaatagcacttgcaggtctacgtgtgtccagaagtggccctggggcgagagcttgacgtggctgtcctcgtggatgtccaagtgccacgtgaactatgcaatttaaagggttgacccacactaggcgaaactggactcgtacgactcttttatatttttatacttgaaatgaaatcttttgcttcttttctaagcgaatgattgctttcaatgtttgcactgatctagttgcatggttagtcagaaactgccatttgaaaaaaaaagttatttttatagctgcagaaaaatgaatacagttaaatgtattatacataattttggaaccaaagaggccagcggatcagttttaatttttattagatggtgaggccatcttctatgaggtagatgttctaaacaatccttcgagtggcctgccagtgtttcagggtataaatgattttttttttattcagttgatgtgtcttttctgtccgtacacacccagaaggtagagtaaaataaatgactggtggagtgaaggtgtgtgctgtaagtcctcacctttagtttatttaataaatccctccttaggttctgtttcataataacttaaaaccaaacaattttcccccacagactggctgtcttaagtattttacgttcatgtacagtataagacaataaaagatggagtgccacgg

SEQ ID NO: 91 - protein, 411 aa, Mus musculus
MDGLPGRALGAACLLLLVAGWLGPEAWGSPTPPPSPAAPPPPPPPGAPGGSQDTCTSCGGGGGGFRRPEELGRVDGDFLEAVKRHILSRLQLRGRPNITHAVPKAAMVTALRKLHAGKVREDGRVEIPHLDGHASPGADGQERVSEIISFAETDGLASSRVRLYFFVSNEGNQNLFVVQASLWLYLKLLPYVLEKGSRRKVRVKVYFQEQGHGDRWNVVEKKVDLKRSGWHTFPITEAIQALFERGERRLNLDVQCDSCQELAVVPVFVDPGEESHRPFVVVQARLGDSRHRIRKRGLECDGRTSLCCRQQFFIDFRLIGWNDWIIAPTGYYGNYCEGSCPAYLAGVPGSASSFHTAVVNQYRMRGLNPGPVNSCCIPTKLSSMSMLYFDDEYNIVKRDVPNMIVEECGCA

SEQ ID NO: 92 - DNA, 2770 bp, Mus musculus
  misc_feature (1)..(1): n is a, c, g, or t
ncggccctgcgcaagctgcacgccggcaaggtgcgcgaggacggccgcgtggagatcccgcacctcgacggccacgccagcccgggcgccgacggccaggagcgcgtctccgagatcatcagctttgcagagacagatggcctcgcctcctcccgggtccgcctgtacttcttcgtctctaatgaaggcaaccagaacctattcgtggtgcaggccagcctgtggctgtacctgaaactgctcccctatgtcctggagaagggcagcaggaggaaggtacgggtcaaggtgtacttccaagaacagggtcacggagacaggtggaatgtggtggagaagaaggtggacctgaaacgtagcggctggcatacctttcccatcacagaggccatccaggccttgtttgagcgaggggagagacgccttaacctggatgtgcagtgtgacagctgccaggagctggccgtggtgcctgtgttcgtggaccccggtgaggagtcacacaggccctttgtagtggtgcaggcccgcctgggcgatagcagacatcgcatccgcaaacggggcctagagtgtgatgggcggaccagcctctgttgcaggcaacagttcttcatcgactttcggctcatcggctggaacgactggatcattgcgcccactggctactacgggaactactgtgagggcagctgcccggcctatctggccggggtccctggctcagcttcctccttccacacagccgtggtgaaccagtaccgcatgcgtggcctgaaccctgggcccgtgaactcttgctgcatccctaccaagctgagctccatgtccatgctctactttgatgacgagtacaacattgtcaagcgggatgtgcccaacatgatcgtggaggagtgtggctgcgcctgacagaggcaacgggggcggagcacaggcccatgggtctttgagggagcaggagaggcaggtgggctgagtgtggttgttccattgggccgtgaagagtgccagggtgaggcctgaaataatgttctcccgctttgtagaaaaccagtcaggaccagagggagaatccctctgtggcacgagagactcctaactgcacacatagacacgcatagccagactcacgcagtctgccacccacacagcagcctctgggataccagcaaacggatgcggtgacaaatggcaccaatgcctgtcagtctgaaagaatggggtgagcagccaccattcccaccagctggccgggcactctgaattgcgccttctgagcacacataaaagcacacaaagacagaggacacagagagagtgagccagagagccaccaagaggaaaagcagggtgggagcacaggcgggtggagggccatgtgtccctgacttgtcccaggttcttcaccgaagcgcctggcacagtcctgcctgctcactgcccgcctggcatcctccatgctttgaggccagcagagctgtgccacccctgttcttggagagggcaagtagcccaggagcgactcacctgtcacagagaccatggagcagggacagtgaccctttgatggtctgtcacttgcgtcccccatgtgacttatatatgtgtgtatgtgtgtttgttttcgggggtgttgggggagggagagaagaagggtcttaattttatgctttaaattcatctccaacaactgacaggtcactggtgccagttgcagaattgaaaagagcctatcagctatggcctttgaagcggaaaggccaaacgattcgaagtgagaaggaaagaaaaatgttgcaatcggtgccctttgctggggacttcctcctggtgttatgcttagaggggagggccactggcaagggggagagacaggggaggcagtggcagagtgaggctgttctgaggagctgctcagctgggcttggagagagagggagagcttttggttgctttgcagaagttgttcccgagggtgagccctggcttcagggttgtccgtggacatgtcccctgcccagttcacttgccctcccgcctgctccacaatgcacttgcggtcctgagtgaatgcacaccacaatagcacttgcaggtctacgtgtgtccagaagtggccctggggcgagagcttgacgtggctgtcctcgtggatgtccaagtgccacgtgaactatgcaatttaaagggttgacccacactaggcgaaactggactcgtacgactcttttatatttttatacttgaaatgaaatcttttgcttcttttctaagcgaatgattgctttcaatgtttgcactgatctagttgcatggttagtcagaaactgccatttgaaaaaaaagttatttttatagctgcagaaaaatgaatacagttaaatgtattatacataattttggaaccaaagaggccagcggatcagttttaatttttattagatggtgaggccatcttctatgaggtagatgttctaaacaatccttcgagtggcctgccagtgtttcagggtataaatgattttttttttattcagttgatgtgtcttttctgtccgtacacacccagaaggtagagtaaaataaatgactggtggagtgaaggtgtgtgctgtaagtcctcacctttagtttatttaataaatccctccttaggttctgtttcataataacttaaaaccaaacaattttcccccacagactggctgtcttaagtattttacgttcatgtacagtataagacaataaaagatggagtgccacgggc

SEQ ID NO: 93 - protein, 303 aa, Mus musculus
  misc_feature (1)..(1): Xaa can be any naturally occurring amino acid
XALRKLHAGKVREDGRVEIPHLDGHASPGADGQERVSEIISFAETDGLASSRVRLYFFVSNEGNQNLFVVQASLWLYLKLLPYVLEKGSRRKVRVKVYFQEQGHGDRWNVVEKKVDLKRSGWHTFPITEAIQALFERGERRLNLDVQCDSCQELAVVPVFVDPGEESHRPFVVVQARLGDSRHRIRKRGLECDGRTSLCCRQQFFIDFRLIGWNDWIIAPTGYYGNYCEGSCPAYLAGVPGSASSFHTAVVNQYRMRGLNPGPVNSCCIPTKLSSMSMLYFDDEYNIVKRDVPNMIVEECGCA

SEQ ID NO: 94 - DNA, 1810 bp, Mus musculus
gagattattgaagtttccacagacggtcagctgttgagaggttcgtgctcaagttgaggatctaagccgccagccaaaatgtgtaagggactggcagctctgccgcactcatgcctggaaagggccaaggagatcaagatcaagttgggaattctcctccagaagccagactctgctgttgaccttgtcattccatacaatgagaagccagagaagcctgccaaggcacacaagccctcactggaggaggtcctgcagtggcgccagtccctggacaagcttctccagaacagctatggatttgccagcttcaaaagtttcctgaagtctgaattcagtgaggaaaaccttgagttctgggttgcctgtgagaattacaagaagatcaagtcccccatcaaaatggcggagaaggcaaagcaaatttatgaagaattcatccagacagaggcccctaaagaggtgaacattgaccacttcactaaagacatcaccatgaagaacctggtggaaccgtctcctcgcagctttgacttggcccagaaaaggatctatgccctgatggagaaggattctctgccccgctttgtgcgctctgaattttataaggagctaatcaagtagtcatctggtcaggcttccaaaagttgccctgtgagttgagttacatcctttgtagcaacacagcatcctcccaggcacctgcacagttctccatagcagctttgctccaagatacacaaacataggcaaaccacaggctgtgttgctaactctttcgctcatgttagtttggttatgtggatctgttgtctaagagccctcacttttttctttttcttttttttttcttttttttggttctttctgactgctttgtaataaagatttaccaagtcattgtcagtctaagtcacaaaaatatccagtttaacataaagctgtctgtgcaaagaataggtgatagactgctattttaaccaggctgaaaagaaaaacagatgcaagtgtcccctttcatggggatttgactggtcttgtttattgttttaattcttattctctaatggcttcagaatttggttagtaaaatagcagcaagctggtcataaggcagccaccgttgggtttttcagcaaatgcattatttaacactactgatctctcctttctagagtaccgctgtgttatctggacattctcaataagagatacaatgaatacattgtgcttctaaacaggattcatttcaatcctgcccttcatgtttccaaatctcgaggggaaaatggcagcctttgactttctcgaacaattagaaatgctaatgcccagacattttttgagctgtttcttaaacaatggaaacaataatttaaaattaatattttcttcacattagttggaatagccgaatgtctgaaaatacccaaggagtgaaccggctgttacacactcactcagatgcctcctgtcattgtaacctcaattgactctgctcacaaattgtgtgattggttagtcttgtcagtgcagggtgagaagggtaggaagggtgcctcaagggcagtgctgtgaggccacaaaaggatgcaggcaggcatgcttctgcagtctaagggctgcattatatatccagatatttactgtatcactatataattttaaatttagagcaatatatatacatacacacacacatatatatacatatatatttttctaatatataaaatactcaatgggcgataagtagtctagttccaaaggaaaagccaaatgtattaaaattggactagaaactatttgt

SEQ ID NO: 95 - protein, 181 aa, Mus musculus
MCKGLAALPHSCLERAKEIKIKLGILLQKPDSAVDLVIPYNEKPEKPAKAHKPSLEEVLQWRQSLDKLLQNSYGFASFKSFLKSEFSEENLEFWVACENYKKIKSPIKMAEKAKQIYEEFIQTEAPKEVNIDHFTKDITMKNLVEPSPRSFDLAQKRIYALMEKDSLPRFVRSEFYKELIK

SEQ ID NO: 96 - DNA, 6639 bp, Mus musculus
gagtgcgcctctgctcccttcagagcacagcctggtgtcaaggtccaggttccaccggctgctgctgtcaccgcaggggagtctagcccctcccagaaggagacacagaagaatggccatctcaactggtttgttcctgctgctggggctccttggccagccctgggcaggggctgctgctgattcacaggctgtggtgtgcgaggggactgcctgctatacagcccattggggcaagctgagtgccgctgaagcccagcatcgctgcaatgagaatggaggcaatcttgccaccgtgaagagtgaggaggaggcccggcatgttcagcaagccctgactcagctcctgaagaccaaggcacccttggaagcaaagatgggcaaattctggatcgggctccagcgagagaagggcaactgtacgtaccatgatttgccaatgaggggcttcagctgggtgggtggtggagaggacacagcttattcaaactggtacaaagccagcaagagctcctgtatctttaaacgctgtgtgtccctcatactggacctgtccttgacacctcaccccagccatctgcccaagtggcatgagagtccctgtgggacccccgaagctccaggtaacagcattgaaggtttcctgtgcaagttcaacttcaaaggcatgtgtaggccactggcgctgggtggtccagggcgggtgacctataccacccctttccaggccactacctcctctctggaggctgtgccttttgcctctgtagccaatgtagcttgtggggatgaagctaagagtgaaacccactatttcctatgcaatgaaaagactccaggaatatttcactggggcagctcaggcccactctgtgtcagccccaagtttggttgcagtttcaacaacgggggctgccagcaggattgcttcgaaggtggcgatggctccttccgctgcggctgccggcctggatttcgactgctggatgatctagtaacttgtgcctccaggaacccctgcagctcaaacccatgcacaggaggtggcatgtgccattctgtaccactcagtgaaaactacacttgccgttgtcccagcggctaccagctggactctagccaagtgcactgtgtggatatagatgagtgccaggactccccctgtgcccaggattgtgtcaacactctagggagcttccactgtgaatgttgggttggttaccaacccagtggccccaaggaagaggcctgtgaagatgtggatgagtgtgcagctgccaactcgccctgtgcccaaggctgcatcaacactgatggctctttctactgctcctgtaaagagggctatattgtgtctggggaagacagtacccagtgtgaggatatagatgagtgttcggacgcaaggggcaatccatgtgattccctgtgcttcaacacagatggttccttcaggtgtggctgcccgccaggctgggagctggctcccaatggggtcttttgtagcaggggcactgtgttttctgaactaccagccaggcctccccaaaaggaagacaacgatgacagaaaggagagtactatgcctcctactgaaatgcccagttctcctagtggctctaaggatgtctccaacagagcacagacaacaggtctcttcgtccaatcagatattcccactgcctctgttccactagaaatagaaatccctagtgaagtatctgatgtctggttcgagttgggcacatacctccccacgacctccggccacagcaagccgacacatgaagattctgtgtctgcacacagtgacaccgatgggcagaacctgcttctgttttacatcctggggacggtggtggccatctcactcttgctggtgctggccctagggattctcatttatcataaacggagagccaagaaggaggagataaaagagaagaagcctcagaatgcagccgacagctattcctgggttccagagcgagcagagagccaagccccggagaatcagtacagcccaacaccagggacagactgctgaagactatgtggccttagagacagctgccactaccttcagagctaccttcttagatgagggggaagccacatcattctgaatgacttgactggactctcagcaaaaaaattgtgcaccttccacttaagaacctggtggcttgggataggcaggtattttcttggtgcctttgatatgtctgggggtgaaagctgtgtgttggtttgtcattgtggggagttttgtggatattgacagacctcactcaaacacccttttcaaatccaatagcaactggttcctctggttcctaattagggggaaaggagtcagaggggtgggacagggtggggggatggggcttcaaagttttttcttatcacttgatttatcatcgaaggagttactggtgctaattacaatggaaacagttcctttccatcacaggacagacagcaaaccaatttaaaactacttaactaggtgagagtgctctacccttcctatagggactttttcaggatggctgcctttgtgtacatttgccttctggcatttccccttcacgtcccccccccccccccagcccccttggtattgttgaaactgtcagaatgagaggaagttcaaccaactgcttagggagtaagctggcaggaagtttagatattgtatcccctcactcttaactttctgatagccttgggtttatgggcaagcaaagttacaagttgggaagttgcttcaagtgagtgagaggtcttggtaaaagcataatccagagggggaggcaggaggggattgttttaacagatatttgaatgaaaatatcagaatgaactgatgctaacacacacctgattattgagaaacaataacaaaactcctagattcatttgtctttgcgctagcacaggccccaactccactgcagggcaccctgtctacctttatactgtccctaactggaagctggtactgtaggctcagaaagccttaggaggctttcattctgaacgtaaggaaaggatgtgtgagccaggtgatgggctctattttaaatgctcccatttaagtttaccttagtccacttcacagttaaaagtacatctggaggacttgagccctatcttgttggcgtgacacataccaaaccaaggattagtcatgaagaaagttctctctctctctttttttttcttaaaaaaaaaaaaaaggagatagaggggaaagggaaaggggaagagagaacagctaaaaaatgtccagcctttaaaactgcttagagccatcttatgattgacatgtttatttcaaagtgtccatttacaaaagtgtcccttaaacttgcaaaagtgtcccttaaacttgctgacggtaatgttgtttcagctgcacaggtctgtctggggactggaaggcatccctggtgagtcacttcagtatctctgggaggcttcatcttagttgtctctgctgtttgaaaagctgagacatggaatgtgtctccatcatgagattcagagtctttgttctcagactagagaactttggtttctaggaacaaaggcacccatccctcaagttgatatccaggaatcgaacgttaataacaagcagattcaagacctttggaaatatcttagagaaatatattagagaaatacctttttttggccaatttaaaatgaagatatttttattagtctctctctctcctccctctctctctctctctcttctctctctctctctctctctctctctctctctctctgaaaacacaaggtggagagtaatgggaaaaagatcgggctcagtgggatgcctgaaatgagtgcatttaaaaatcaactcagcatctggctttcagttgaagtttgggtgtttggaacaggatccctggcaataactgagattggcagctaatccattaccagcagaccagcattaccagcctttcagatcattcagatgaatttagagccatggtagtatctgcatatacggacatgaccctaaaagcatcacttttacctccaggccttcaactgctcacctttatggctggagatgaggaagataactgaatctaggctccccacagctgtgtttgatctatgcccaggctgctgtgtaggacttcaactgaccaggatgacttaggggatagacatgaagctccatttccaatactcctaggggtacaggatccactctgtgggacccacaacagggaagggaatgatgaggaacatattttctcaaagtgtgctttcagcatgagccactcccgtggagacagagctctctcatctcctgacctgccaaagccttcaggagaaccatacctcatgtggcaaagccaatggagccactcactgttcctaaatgggtgctttattttcacatatattcttttttttttttttttttgagacagggtttctctgtatagccctggctgtcctggaactcactcagtagaccaggctggcctcgaactcagaagtctgcctgcctctgcctcccaagtgctgggattaaaggtgtgcgccaccactgcccagcctcacatatattcttgctgtcctcatacttgagactggaaaattctggcttagggcatctaagaggcaaagcaataaataagtgaacttctactggaccaaaggtgtgttaggctatgccttctctacccacgacatcagtgagcagagacagaacactcctctgcctgtgaggaccagaggaagtactacttggcaacagaattttcttaagtccagacctggaaaaactgtattttggaggggcataccttcaggcctccagcctacccattactgagttgtaggtggccatcactgtcctttgtattttatgtggttctggcgatggtagccagcacatgagtatggtagacactagccttccaggatccctatactcctagtaccttgcattatttttgttcattattaaagatagtcaaaaagcaatacctcctcacccccagtaatttgaggagttaaacaaacaaacaaacaaacaaactactcagaaagaagtgcctggagagagagagagccctaaacactatttgcaaaggaagtctagcctcagttttccctggtgtctagcatggctttgatgcaaccccaaatgtatgcattttctggctttggagacccacttatcattatcattactaccatcaccaccaccactaccaccaccgtcaccatcactgtcatcaccagctcagggtgctacgcatcatcatggtgttttattaatgacagtaactggatgaatcccacctgtctctaactgagagcaaaaaggccagacagaagaggagcagaaagaagagaagcgggctgctttccttcagcttcatacccggggaaaccgagtaagcctctgggaaggtctaccctgattccttccccagagcactggataatgtggaatgaaacacaaatacttttgagtacatgttcacagtgcagggcaagctgccgagaaagaactctttacctcctcatcaagttttcctcctctttgagttcctaaccatgagcctcgcgtggactgttatcaccaaccaaactttcaataggtggatgggatcactaggtcattttgttctgcctctcttttctcataaatatttctgcccaaactaaaggaacagagatgagatttgaccaaaaaaggaaaaaaaaaagattactccattcaaaataacatattttttgaaagcaaatataggaaagccttttcctattattttttttcttcttagcttccccattgtctgaattgggaaaacaggaaagcattgctttctagcacctgcaaaatggtttaatgcccctgcatatttccatgtccttccaacaatagatttagcatgggaatctgaaatagacgccctgaaaacatctgtctcttccccagctcctaaacccaggctttgattatgtatggtttgtgaaatctatcatccaaaacggggacagacacacctcaatcctccatggggtcaacaactatatacccccagtgaccccttaggcaaggacttgttgagaactgcatcacattttgacctgttctcaacagtacccatctatttcaggtgggatctctggacctttcctccttcccatcttgtctgcaatgtggcaaatggcttctttttgcatttttactccgcccccaccccaagctgaagttcatttgcagatcagcgattaagtctgaattgtgtggtggtcagtcttgtttccttttgtcaggggttattgtaaatgttagtaatttcgcctcaagccctcagtaagaacataaatattttaaaatatgtgcgtttgaaatctgtttcatgcatcctggaactgtgggatgctcaggcaagagtgactttagtctttcagtgaatgttgcccagaatgtgggtagggaaggctcacaggttactctcctccttagagctacaacataacattctgaggggagtcacagggttgcctttaaaaagtgggagctatgtcatgctttgagctttctgttaagcacctctcctaataaactctgaaaaaata

SEQ ID NO: 97 - protein, 644 aa, Mus musculus
MAISTGLFLLLGLLGQPWAGAAADSQAVVCEGTACYTAHWGKLSAAEAQHRCNENGGNLATVKSEEEARHVQQALTQLLKTKAPLEAKMGKFWIGLQREKGNCTYHDLPMRGFSWVGGGEDTAYSNWYKASKSSCIFKRCVSLILDLSLTPHPSHLPKWHESPCGTPEAPGNSIEGFLCKFNFKGMCRPLALGGPGRVTYTTPFQATTSSLEAVPFASVANVACGDEAKSETHYFLCNEKTPGIFHWGSSGPLCVSPKFGCSFNNGGCQQDCFEGGDGSFRCGCRPGFRLLDDLVTCASRNPCSSNPCTGGGMCHSVPLSENYTCRCPSGYQLDSSQVHCVDIDECQDSPCAQDCVNTLGSFHCECWVGYQPSGPKEEACEDVDECAAANSPCAQGCINTDGSFYCSCKEGYIVSGEDSTQCEDIDECSDARGNPCDSLCFNTDGSFRCGCPPGWELAPNGVFCSRGTVFSELPARPPQKEDNDDRKESTMPPTEMPSSPSGSKDVSNRAQTTGLFVQSDIPTASVPLEIEIPSEVSDVWFELGTYLPTTSGHSKPTHEDSVSAHSDTDGQNLLLFYILGTVVAISLLLVLALGILIYHKRRAKKEEIKEKKPQNAADSYSWVPERAESQAPENQYSPTPGTDC

SEQ ID NO: 98 - DNA, 2543 bp, Mus musculus
ccagcacatcccggtgcttcttctcaggcgcagcagctttcctctgcggcagccgcacctcgccaaacggcgtagtgctgcaggctcgcccgagttgctgcttgctgcctctgctgccgctgccgcgggccgccctgcgcggaccgtaggctgcgcagacgccacctccgatcctgtatcgctgcgggcgcctcggcgcgccctgtgatccgcaatcctgcggcgggcggcatgggataatgcggccatggtgcgccgagatcgcttgcgcaggatgagagagtggtgggtccaagtagggctcctggctgtgcccttgctggctgcgtacctgcacatcccgccccctcagctctcccctgctctgcactcatggaagacttctggcaagtttttcacctacaaaggcctacgcatcttctaccaagattctgtcggtgtggtcggaagccctgagatagttgtgcttttacatggctttccaacatccagctatgactggtacaagatctgggaagggctgaccctgaggttccatcgagtgatcgcccttgatttcttaggctttggcttcagtgacaagccgagaccacatcagtactccatatttgagcaggccagcatcgtagagtcccttctgcggcacctggggctccagaaccgcagaatcaacctgctgtctcacgattatggagatatcgttgctcaggaactgctgtacaggtacaagcagaatcgatctggccggctcaccataaagagtctctgtctgtcgaatggaggtatctttcctgagacgcatcgtcctctccttctccaaaagctcctcaaagacggaggtgtgctttcccccatcctcaccaggctcatgaatttcttcgtgttctctcgaggtctcactccagtctttggaccgtatactcgacccactgagagtgagctgtgggacatgtgggctgtgattcgcaacaatgacggcaacctggtcatcgacagtcttttacagtacattaatcaaaggaagaaattcagaagacgctgggtgggagcgcttgcttctgtgtccatccccattcattttatctatgggccattggatcctataaatccgtatccagagtttttggagctgtacaggaaaacgctgccgcggtccacagtgtcgattctggatgaccacattagccactacccacagctagaggatcccatgggcttcttgaatgcatatatgggcttcatcaactccttctgagctggaaagagtagcctccctgtattacctcccccattctcgtatctgtgtgtattccacttagaaatgcccaaaagaggtcctggccatcaaatactatcctttcatcaaagtccatttccttcacattggtgaacaaactacaggaatcaggcagctggaactctatagggtgacacaatagtccacctcatctctaagggtgacatgataatcctctcatttctgtgacatctgaccaaataaatagagctgctgttgttttgtgttattaggacattctgactaataacacttttcatttatgtagaaaaacagcattagatattcttttttggtgttaaatacctcaaaaaacccccaaaacataataacaacaaaaacccagtttctgtggactttattaaaatatttagaagtgctcccttccggcccaatcctaactggaatacagagtgagggaggagcttgctatctccctttcaggatctgttacagtttatgagagggatcatcttgtcactcctttacatttagtttcatcggctgcttctaacagacatttttgttaaaacagacattggcttagggggctggggaagtagctcagtggtagtgtgcctgcctagcatgttaaagcccttgggttcagttcccagcactctccccaccccagcccatcgaacctaaatagacattggcgtaaatacagtgttctgagtatgagtctaagactgatttgcatactcatgtatatatttacaaacagttggcccttgctaagaagaaaacctcattatatatagaatttgtgaataaacaggttgaaattatttgcagaatttcctaaaactgccaggcattaagaactgcatctgtgccagagatttactgttactgtttagaaagtccaagctgaatagtaaataacagcctaggggcagctcctccagggctgacgtggaggggaagggacatgtaagtgcggaatgaatgtccattggctcctctatgatggccgctcagcatcccgctggctgttcagaaaggctttctcatataactcctgtacttaaacaggcaagtttccagagacattaagaacaaattctgaaagacctaagagcaaatggtgctgaatacttttttaagccacagttttaacttagttaaagcagcattattgattattttaaattcgttttttaaattagaaatttcaagtatagcaactttgaaactggaatgaatgagtgtttattttctattaataaaaacaaactgtgac

SEQ ID NO: 99 - protein, 335 aa, Mus musculus
MVRRDRLRRMREWWVQVGLLAVPLLAAYLHIPPPQLSPALHSWKTSGKFFTYKGLRIFYQDSVGVVGSPEIVVLLHGFPTSSYDWYKIWEGLTLRFHRVIALDFLGFGFSDKPRPHQYSIFEQASIVESLLRHLGLQNRRINLLSHDYGDIVAQELLYRYKQNRSGRLTIKSLCLSNGGIFPETHRPLLLQKLLKDGGVLSPILTRLMNFFVFSRGLTPVFGPYTRPTESELWDMWAVIRNNDGNLVIDSLLQYINQRKKFRRRWVGALASVSIPIHFIYGPLDPINPYPEFLELYRKTLPRSTVSILDDHISHYPQLEDPMGFLNAYMGFINSF

SEQ ID NO: 100 - DNA, 2163 bp, Mus musculus
gaggctggcaagagcacagcgctgctgctgggttgaggaaattgatgacggggaagcatgcgggcaacacagtgtataaaactcataaccgtgtaggctgaagctcagctactactttggacggctgcttccctccagcaaagaccacgacggcagggagctgagcaggagccagctgcgagacatgaagagcctcttgctgctgaccacactcctggtacctctgcacctgggcatggcctggagcgccaaatatgcggtggattgcccggaacattgtgacaaaactgagtgcagaagcagcctgcgttgcaagaggacagtgctggatgactgtggctgctgccaggtgtgcgccgcgggacctggagaaacctgctaccgtacagtctcaggcatggacggggtcaagtgtggtccggggctgaagtgtcacttttacagcgaggaggatgattttggtgacgagtttggtatctgcaaagactgtccctatggcaccttcgggatggaatgcaaagagacttgcaattgccagtcgggcatatgtgacagggtgaccggaagatgtctggactttcccttcttccagtatgcagcagccaaatctcccagcaggacctctgcctcccacacagagcgtgactcagcatccggagatggcaacgctgtgagagaagagattggagaagggaacgctgctcggccctccgtgatgaaatggttaaatccacgctgatcctggctgagatttgccaagagaaggctccattttagtgaccaacattcagccaacattttaagaacggtctagaacataggctgtggacatgtaatttatggagatcaagtgtgattcagaaaaagaatgtaggctacatacaacccataagacacatatgactgaacccttttaggtatttgctaaatatttaaattcatatagatctgctaagtgtgtgtgtgtgtgtgtgtgtgtgtgtgtgtgtgtgtggtatcaccaaggaacttgagatggccttgctgtcgatgagtaatccaatcaaagctgaaggaccgaccggtggtttcattgacctgggtgcacattcttattgtgatacaggttgaagaagagttgggagcaggagacagtgggatcgttgtgaaagtaggggttataatatttgtgtcctccttgtagtagtttaaaatttttttattttgtcttacttggaggcgataaaacaagaccagaaaagccttgaaggaagtgagatattggaagctgaacaactgctttgaatggaaatgctgttattacagctccttgtatctgatgagaatgggggcgggcagaggaggtggacagaggaaagagtatatattatattcccatcacttctcatctctggtttaaacactgtgggccttgagacagatgtagaaagtagtttgccctcctgagggacagaacagggtgaaggtgaatatttatgtatttttataaacaaatcttgtagtttaaatatttctccagcacccatatgtctccccatcttagaaaagttaccctaatgttgcttgtttaaaatgggttctcaaatactcatatatggaaaatgtgttattaacaattgcactaatagtaataaaatgtagttactccaggtgtataaaattttgaaaatttttttaaatgctatatcttgagtgaattttaaatttaaatcaaaaattaactttttagacagtttgagaaaggaaagttaactttcattaggaaatgtgtcagctttaaggtatagtttattttcattttttaaaattctttctaacttgattgatgaatggacctgagtttttacccggaggaccttagcacaagaagaactgttgtcctgccaatgctgggagatatttgcagagtattttatttggagtgaagaacttatttaagaagtatttgcttatttccttatattttattctcaaaccttgccaacagagttgtgaatgtactcgtgggaagatccgtgaatgtaagcgcaaccggctgttaggttttgtcttaaaagaacggtgtattattgttcaataaaaatggcacagctgttccatgttaaaaaaaaaaaaaaaaaaaaaaaaaaaaaaaaaaaaaaaaaaaaaaaaaaaaaaaaaaaa

SEQ ID NO: 101 - protein, 184 aa, Mus musculus
MKSLLLLTTLLVPLHLGMAWSAKYAVDCPEHCDKTECRSSLRCKRTVLDDCGCCQVCAAGPGETCYRTVSGMDGVKCGPGLKCHFYSEEDDFGDEFGICKDCPYGTFGMECKETCNCQSGICDRVTGRCLDFPFFQYAAAKSPSRTSASHTERDSASGDGNAVREEIGEGNAARPSVMKWLNPR

SEQ ID NO: 102 - DNA, 2130 bp, Mus musculus
gaggctggcaagagcacagcgctgctgctgggttgaggaaattgatgacggggaagcatgcgggcaacacagtgtataaaactcataaccgtgtaggctgaagctcagctactactttggacggctgcttccctccagcaaagaccacgacggcagggagctgagcaggagccagctgcgagacatgaagagcctcttgctgctgaccacactcctggtacctctgcacctgggcatggcctggagcgccaaatatgcggtggattgcccggaacattgtgacaaaactgagtgcagaagcagcctgcgttgcaagaggacagtgctggatgactgtggctgctgccaggtgtgcgccgcgggacctggagaaacctgctaccgtacagtctcaggcatggacggggtcaagtgtggtccggggctgaagtgtcacttttacagcgaggaggatgattttggtgacgagtttggtatctgcaaagactgtccctatggcaccttcgggatggaatgcaaagagacttgcaattgccagtcgggcatatgtgacagggtgaccggaagatgtctggactttcccttcttccagtatgcagcagccaaatctcccagcaggacctctgcctcccacacagagcgtgactcagcatccggagatggcaacgctgtgagagaagagattggagaagggaacgctgctcggccctccgtgatgaaatggttaaatccacgctgatcctggctgagatttgccaagagaaggcaccattttagtgaccaacattcagccaacattttaagaacggtctagaacataggctgtggacatgtaatttatggagatcaagtgtgattcagaaaaagaatgtaggctacatacaacccataagacacatatgactgaacccttttaagtatttgctaaatatttaaattcatatagatctgttaagtgtgtgtgtgtgtgtgtgtgtgtgtgtgtgtgtgtgtgtgtgtgtgtgtgtgttatcaccaaggaacttgagatggccttgctgtcgatgagtaatccaatcaaagctgaaggactgaccagtggtttcattgacctgggtgctcattcttattgtgatacaggttgaagaagagttgggagcaggagacagtgggatcgttgtgaaagtaggggttataatatttgtgtcctccttgtagtagtttaaaatttttttattttgttttacttggaggcgataaaacaagaccagaaaagccttgaaggaggtgagatattggaagcttatgggagtctgagcaactgctttgaatggaaatgctgttattacagctccttgtatctgatgagaatgggggcgggcagaggaggtggacagaggaaagagtatatattatattcccatcacttctcatctctggtttaaacactgtgggccttgagacagatatagaaagtagtttgccctcctgagggacagaacagggtgaaggtgaatatttatgtatttttataaacaaatcttgtagtttaaatatttctccagcacccatatgtctccccatcttagaaaagttaccctaatgttgcttgtttaaaatgggttctcaaatactcatatatggaaaatgtgttattaacaattgcactaatagtaataaaatgtagttactccaggtgtataaaattttgaaaatttttttaaatgctatatcttgagtgaattttaaatttaaatcaaaaattaactttttagacagtttgagaaaggaaagttaactttcattaggaaatgtgtcagctttaaggtatagtttattttcattttttaaaattctttctaacttgattgatgaatggaccctgagtttttacccggaggaccttagcacaagaagaactgttgtcctgccaatgctgggagatatttgcagagtattttatttggagtgaagaacttatttaagaagtatttgcttatttccttatattttattctcaaaccttgccaacagaagttgtgaatgtactcgtgggaagatccgtgaatgtaagcgcaacgggctgttaggttttgtcttaaaagaacggtgtattattgttcaataaaaatggcacagctgttccatgtt

SEQ ID NO: 103 - protein, 184 aa, Mus musculus; identical to SEQ ID NO: 101

SEQ ID NO: 104 - DNA, 256 bp, Homo sapiens
acacctgcctctacgagtgctcccccaacttggggccctggatccagcaggtggatcagagctggcgcaaagagcgggtactgaacgtgcccctgtgcaaagaggactgtgagcaatggtgggaagattgtcgcacctcctacacctgcaagagcaactggcacaagggctgcaactggacttcagggtttaacaagtgcgcagtgggagctgcctgccaacctttccatttctacttccccacacccattgcccg

SEQ ID NO: 105 - protein, 85 aa, Homo sapiens
TCLYECSPNLGPWIQQVDQSWRKERVLNVPLCKEDCEQWWEDCRTSYTCKSNWHKGCNWTSGFNKCAVGAACQPFHFYFPTPIAR

SEQ ID NO: 106 - DNA, 2786 bp, Homo sapiens
agcactctccagcctctcaccgcaaaattacacaccccagtacaccagcagaggaaacttataacctcgggaggcgggtccttcccctcagtgcggtcacatacttccagaagagcggaccagggctgctgccagcacctgccactcagagcgcctctgtcgctgggacccttcagaactctctttgctcacaagttaccaaaaaaaaaagagccaacatgttggtattgctggctggtatctttgtggtccacatcgctactgttattatgctatttgttagcaccattgccaatgtctggttggtttccaatacggtagatgcatcagtaggtctttggaaaaactgtaccaacattagctgcagtgacagcctgtcatatgccagtgaagatgccctcaagacagtgcaggccttcatgattctctctatcatcttctgtgtcattgccctcctggtcttcgtgttccagctcttcaccatggagaagggaaaccggttcttcctctcaggggccaccacactggtgtgctggctgtgcattcttgtgggggtgtccatctacactagtcattatgcgaatcgtgatggaacgcagtatcaccacggctattcctacatcctgggctggatctgcttctgcttcagcttcatcatcggcgttctctatctggtcctgagaaagaaataaggccggacgagttcatggggatctggggggtggggaggaggaagccgttgaatctgggagggaagtggaggttgctgtacaggaaaaaccgagataggggaggggggagggggaagcaaaggggggaggtcaaatcccaaaccattactgaggggattctctactgccaagcccctgccctggggagaaagtagttggctagtactttgatgctcccttgatggggtccagagagcctccctgcagccaccagacttggcctccagctgttcttagtgacacacactgtctggggccccatcagctgccacaacaccagccccacttctgggtcatgcactgaggtccacagacctactgcactgagttaaaatagcggtacaagttctggcaagagcagatactgtctttgtgctgaatacgctaagcctggaagccatcctgcccttctgacccaaagcaaaacatcacattccagtctgaagtgcctactggggggctttggcctgtgagccattgtccctctttggaacagatatttagctctgtggaattcagtgacaaaatgggaggaggaaagagagtttgtaaggtcatgctggtgggttagctaaaccaagaaggagaccttttcacaatggaaaacctgggggatggtcagagcccagtcgagacctcacacacggctgtccctcatggagacctcatgccatggtctttgctaggcctcttgctgaaagccaaggcagctcttctggagtttctctaaagtcactagtgaacaattcggtggtaaaagtaccacacaaactatgggatccaaggggcagtcttgcaacagtgccatgttagggttatgtttttaggattcccctcaatgcagtcagtgtttcttttaagtatacaacaggagagagatggacatggctcattgtagcacaatcctattactcttcctctaacatttttgaggaagttttgtctaattatcaatattgaggatcagggctcctaggctcagtggtagctctggcttagacaccacctggagtgatcacctcttggggaccctgcctatcccacttcacaggtgaggcatggcaattctggaagctgattaaaacacacataaaccaaaaccaaacaacaggcccttgggtgaaaggtgctatataattgtgaagtattaagcctaccgtatttcagccatgataagaacagagtgcctgcattcccaggaaaatacgaaaatcccatgagataaataaaaatataggtgatgggcagatcttttctttaaaataaaaaagcaaaaactcttgtggtacctagtcagatggtagacgagctgtctgctgccgcaggagcacctctatacaggacttagaagtagtatgttattcctggttaagcaggcattgctttgccctggagcagctattttaagccatctcagattctgtctaaaggggttttttgggaagacgttttctttatcgccctgagaagatctaccccagggagaatctgagacatcttgcctacttttctttattagctttctcctcatccatttcttttatacctttcctttttggggagttgttatgccatgatttttggtatttatgtaaaaggattattactaattctatttctctatgtttattctagttaaggaaatgttgagggcaagccaccaaattacctaggctgaggttagagagattggccagcaaaaactgtgggaagatgaactttgtcattatgatttcattatcacatgattatagaaggctgtcttagtgcaaaaaacatacttacatttcagacatatccaaagggaatactcacattttgttaagaagttgaactatgactggagtaaaccatgtattcccttatcttttactttttttctgtgacatttatgtctcatgtaatttgcattactctggtggattgttctagtactgtattgggcttcttcgttaatagattatttcatatactataattgtaaatattttgatacaaatgtttataactctagggatataaaaacagattctgattcccttcaaaaaaaaaaaa

SEQ ID NO: 107 - protein, 157 aa, Homo sapiens
MLVLLAGIFVVHIATVIMLFVSTIANVWLVSNTVDASVGLWKNCTNISCSDSLSYASEDALKTVQAFMILSIIFCVIALLVFVFQLFTMEKGNRFFLSGATTLVCWLCILVGVSIYTSHYANRDGTQYHHGYSYILGWICFCFSFIIGVLYLVLRKK

SEQ ID NO: 108 - DNA, 3108 bp, Homo sapiens
gcctctggctcctcagggcattcccggcggctccgggtttggcaacgaggacgggggagtgcgactgcgtctcgggcagcatggccgagaagcggcacacacgggactccgaagcccagcggctccccgactccttcaaggacagccccagtaagggccttggaccttgcggatggattttggtggcgttctcattcttattcaccgttataactttcccaatctcaatatggatgtgcataaagattataaaagagtatgaaagagccatcatctttagattgggtcgcattttacaaggaggagccaaaggacctggtttgttttttattctgccatgcactgacagcttcatcaaagtggacatgagaactatttcatttgatattcctcctcaggagatcctcacaaaggattcagtgacaattagcgtggatggtgtggtctattaccgcgttcagaatgcaaccctggctgtggcaaatatcaccaacgctgactcagcaacccgtcttttggcacaaactactctgaggaatgttctgggcaccaagaatctttctcagatcctctctgacagagaagaaattgcacacaacatgcagtctactctggatgatgccactgatgcctggggaataaaggtggagcgtgtggaaattaaggatgtgaaactacctgtgcagctccagagagctatggctgcagaagcagaagcgtcccgcgaggcccgcgccaaggttattgcagccgaaggagaaatgaatgcatccagggctctgaaagaagcctccatggtcatcactgaatctcctgcagcccttcagctccgatacctgcagacactgaccaccattgctgctgagaaaaactcaacaattgtcttccctctgcccatagatatgctgcaaggaatcataggggcaaaacacagccatctaggctagtgtagagatgagcgctagccttccaagcatgaagtcggggaccaaattagcctttaactcataaagagagggtagggcttttctttttccatatgtcaattgtggtgttcccagaatgtatagcagttataaaaataggtgaaagaattgttagcttgtaaatactgagagattggtgatttatataaggtaatctgttagtcttaaaatagttaaaagtttgtatttttagattattatgtagtaggttagatccctcttgttttgacttccactgactcattctgaaccccctaagcacccaggccagaggcaagaacctgggctgtaactgccacctgacaccgctgactggctaaatgctttgcagaaagtgatgaccttacaccacaaccagcttctccaggtcatatgtgccttacctccagagagtctttttttttttttttctgagatggagtttcactcttgttgcccaggctggagtgcaatagcatgatctcggctcactgcaacctccgcctcctgggttcaagagattctcctgcctcagcctccccagtagctgggattacaggctcatgccaccatgcccagctaatttttgtattattattattgttttttagtagagacggggtttcaccatgttggccaggctagtcacgaactcctaacctcaggtgatccacccacctctgcctcccaaagtgctgggattacaggcatgagctaccacacctggtttggagagtcttaattaaggaaatttccctaatgttcatttattttctaaatccagaccgtgtttcagaataatccttacttgagagtagccattttcttgcctgtacttgtcagaactagaggaaatagccaagactaatgaaaaagattactctaacccttaaaagacttttaaattcactactagagtggtcattttaaaaatacatccatgttttaacttatttgagccttctttatgagtaaatgattcctccttgttctgtctttcaaaccagctaaatatttgtcacaaaagtgcttttttctcactgttgcctattttcatatatcaggttttaaatagttttaattttttaataaaattttctctacgttctatatgcaattgttatatatctatttgaatagctgaaggactaaaatacttttttaagagataacttcaggaaaccattatattttactatctgcatgctgttaactgtggtacactgtgaaatatgttgattacaaacccattcattacatagtataaggaattcacagtatattgactatatagtgtctaatgatcttgggcagatactgtcaaacttacaatatctatatagatgtaggtctttttaaatttacctagtcattcttctatcatgtatattgatgctgaaagaggaactggtcagctcctctggacaacaaattcttagtctataatattaggagacatcttctgttttgcaaatgtctgtgaatctgagcaacctggcattctgcttactggccagaaagctggcgggtgacatttgtaacatttcctctttgagactctgagttcacctagagaagtctaagcataacagctttctttcccagcacgagcctttatagctctctttagctcaaccactctgtccatccagccaatggatgtcccttcccctgtaccccaatttcaagcttattttaggaagccttgaactaccatgtatcctggctcctagctgagtttattagaggtatggagcagtgcaacttaaactcaagttgcacttacattttgaattttaaaatgatggttttatctgttgtgtgaagtggttcacccttgaggaccaggagcctccatatcctgactgaaaaccttttctgagacttagagtaacagtgcttttggttccttgagttctcctgtctccagataccaaatgaccttgacttttctgccttgtgaattcgtagtccaatcagctgaaattaaatcacttgggagggacgcatagaaggagctctaggaacacagtgccagtgcagaagtttctccaggtggcctccctttccaacaatgtacataataaagtgtatgcactttcactaataaaaaaaaaaaaaaaaaaaaaaaaaaaaaaaaaaa

SEQ ID NO: 109 - protein, 288 aa, Homo sapiens [sequence omitted]

SEQ ID NO: 110 - DNA, 2593 bp, Homo sapiens
gcctctggctcctcagggcattcccggcggctccgggtttggcaacgaggacgggggagtgcgactgcgtctcgggcagcatggccgagaagcggcacacacgggactccgaagcccagcggctccccgactccttcaaggacagccccagtaagggccttggaccttgcggatggattttggtggcgttctcattcttattcaccgttataactttcccaatctcaatatggatgtgcataaaggttattgcagccgaaggagaaatgaatgcatccagggctctgaaagaagcctccatggtcatcactgaatctcctgcagcccttcagctccgatacctgcagacactgaccaccattgctgctgagaaaaactcaacaattgtcttccctctgcccatagatatgctgcaaggaatcataggggcaaaacacagccatctaggctagtgtagagatgagcgctagccttccaagcatgaagtcggggaccaaattagcctttaactcataaagagagggtagggcttttctttttccatatgtcaattgtggtgttcccagaatgtatagcagttataaaaataggtgaaagaattgttagcttgtaaatactgagagattggtgatttatataaggtaatctgttagtcttaaaatagttaaaagtttgtatttttagattattatgtagtaggttagatccctcttgttttgacttccactgactcattctgaaccccctaagcacccaggccagaggcaagaacctgggctgtaactgccacctgacaccgctgactggctaaatgctttgcagaaagtgatgaccttacaccacaaccagcttctccaggtcatatgtgccttacctccagagagtctttttttttttttttctgagatggagtttcactcttgttgcccaggctggagtgcaatagcatgatctcggctcactgcaacctccgcctcctgggttcaagagattctcctgcctcagcctccccagtagctgggattacaggctcatgccaccatgcccagctaatttttgtattattattattgttttttagtagagacggggtttcaccatgttggccaggctagtcacgaactcctaacctcaggtgatccacccacctctgcctcccaaagtgctgggattacaggcatgagctaccacacctggtttggagagtcttaattaaggaaatttccctaatgttcatttattttctaaatccagaccgtgtttcagaataatccttacttgagagtagccattttcttgcctgtacttgtcagaactagaggaaatagccaagactaatgaaaaagattactctaacccttaaaagacttttaaattcactactagagtggtcattttaaaaatacatccatgttttaacttatttgagccttctttatgagtaaatgattcctccttgttctgtctttcaaaccagctaaatatttgtcacaaaagtgcttttttctcactgttgcctattttcatatatcaggttttaaatagttttaattttttaataaaattttctctacgttctatatgcaattgttatatatctatttgaatagctgaaggactaaaatacttttttaagagataacttcaggaaaccattatattttactatctgcatgctgttaactgtggtacactgtgaaatatgttgattacaaacccattcattacatagtataaggaattcacagtatattgactatatagtgtctaatgatcttgggcagatactgtcaaacttacaatatctatatagatgtaggtctttttaaatttacctagtcattcttctatcatgtatattgatgctgaaagaggaactggtcagctcctctggacaacaaattcttagtctataatattaggagacatcttctgttttgcaaatgtctgtgaatctgagcaacctggcattctgcttactggccagaaagctggcgggtgacatttgtaacatttcctctttgagactctgagttcacctagagaagtctaagcataacagctttctttcccagcacgagcctttatagctctctttagctcaaccactctgtccatccagccaatggatgtcccttcccctgtaccccaatttcaagcttattttaggaagccttgaactaccatgtatcctggctcctagctgagtttattagaggtatggagcagtgcaacttaaactcaagttgcacttacattttgaattttaaaatgatggttttatctgttgtgtgaagtggttcacccttgaggaccaggagcctccatatcctgactgaaaaccttttctgagacttagagtaacagtgcttttggttccttgagttctcctgtctccagataccaaatgaccttgacttttctgccttgtgaattcgtagtccaatcagctgaaattaaatcacttgggagggacgcatagaaggagctctaggaacacagtgccagtgcagaagtttctccaggtggcctccctttccaacaatgtacataataaagtgtatgcactttcactaaaaaaaaaaaaaaaaaa

SEQ ID NO: 111 - protein, 123 aa, Homo sapiens
MAEKRHTRDSEAQRLPDSFKDSPSKGLGPCGWILVAFSFLFTVITFPISIWMCIKVIAAEGEMNASRALKEASMVITESPAALQLRYLQTLTTIAAEKNSTIVFPLPIDMLQGIIGAKHSHLG

SEQ ID NO: 112 - DNA, 634 bp, Homo sapiens
cggctgagaggcagcgaactcatctttgccagtacaggagcttgtgccgtggcccacagcccacagcccacagccatgggctgggacctgacggtgaagatgctggcgggcaacgaattccaggtgtccctgagcagctccatgtcggtgtcagagctgaaggcgcagatcacccagaagattggcgtgcacgccttccagcagcgtctggctgtccacccgagcggtgtggcgctgcaggacagggtcccccttgccagccagggcctgggccctggcagcacggtcctgctggtggtggacaaatgcgacgaacctctgagcatcctggtgaggaataacaagggccgcagcagcacctacgaggtccggctgacgcagaccgtggcccacctgaagcagcaagtgagcgggctggagggtgtgcaggacgacctgttctggctgaccttcgaggggaagcccctggaggaccagctcccgctgggggagtacggcctcaagcccctgagcaccgtgttcatgaatctgcgcctgcggggaggcggcacagagcctggcgggcggagctaagggcctccaccagcatccgagcaggatcaagggccggaaataaaggctgttgtaagagaat

SEQ ID NO: 113 - protein, 165 aa, Homo sapiens
MGWDLTVKMLAGNEFQVSLSSSMSVSELKAQITQKIGVHAFQQRLAVHPSGVALQDRVPLASQGLGPGSTVLLVVDKCDEPLSILVRNNKGRSSTYEVRLTQTVAHLKQQVSGLEGVQDDLFWLTFEGKPLEDQLPLGEYGLKPLSTVFMNLRLRGGGTEPGGRS

SEQ ID NO: 114 - DNA, 1182 bp, Homo sapiens
acctctcaagcagccagcgcctgcctgaatctgttctgccccctccccacccatttcaccaccaccatgacaccgggcacccagtctcctttcttcctgctgctgctcctcacagtgcttacagctaccacagcccctaaacccgcaacagttgttacgggttctggtcatgcaagctctaccccaggtggagaaaaggagacttcggctacccagagaagttcagtgcccagctctactgagaagaatgcttttaattcctctctggaagatcccagcaccgactactaccaagagctgcagagagacatttctgaaatgtttttgcagatttataaacaagggggttttctgggcctctccaatattaagttcaggccaggatctgtggtggtacaattgactctggccttccgagaaggtaccatcaatgtccacgacgtggagacacagttcaatcagtataaaacggaagcagcctctcgatataacctgacgatctcagacgtcagcgtgagtgatgtgccatttcctttctctgcccagtctggggctggggtgccaggctggggcatcgcgctgctggtgctggtctgtgttctggttgcgctggccattgtctatctcattgccttggctgtctgtcagtgccgccgaaagaactacgggcagctggacatctttccagcccgggatacctaccatcctatgagcgagtaccccacctaccacacccatgggcgctatgtgccccctagcagtaccgatcgtagcccctatgagaaggtttctgcaggtaatggtggcagcagcctctcttacacaaacccagcagtggcagccacttctgccaacttgtaggggcacgtcgcccgctgagctgagtggccagccagtgccattccactccactcaggttcttcagggccagagcccctgcaccctgtttgggctggtgagctgggagttcaggtgggctgctcacagcctccttcagaggccccaccaatttctcggacacttctcagtgtgtggaagctcatgtgggcccctgagggctcatgcctgggaagtgttgtggtgggggctcccaggaggactggcccagagagccctgagatagcggggatcctgaactggactgaataaaacgtggtctcccactgcgccaaaaaaaaaaaa

SEQ ID NO: 115 - protein, 264 aa, Homo sapiens
MTPGTQSPFFLLLLLTVLTATTAPKPATVVTGSGHASSTPGGEKETSATQRSSVPSSTEKNAFNSSLEDPSTDYYQELQRDISEMFLQIYKQGGFLGLSNIKFRPGSVVVQLTLAFREGTINVHDVETQFNQYKTEAASRYNLTISDVSVSDVPFPFSAQSGAGVPGWGIALLVLVCVLVALAIVYLIALAVCQCRRKNYGQLDIFPARDTYHPMSEYPTYHTHGRYVPPSSTDRSPYEKVSAGNGGSSLSYTNPAVAATSANL

SEQ ID NO: 116 - DNA, 1155 bp, Homo sapiens
acctctcaagcagccagcgcctgcctgaatctgttctgccccctccccacccatttcaccaccaccatgacaccgggcacccagtctcctttcttcctgctgctgctcctcacagtgcttacagttgttacgggttctggtcatgcaagctctaccccaggtggagaaaaggagacttcggctacccagagaagttcagtgcccagctctactgagaagaatgcttttaattcctctctggaagatcccagcaccgactactaccaagagctgcagagagacatttctgaaatgtttttgcagatttataaacaagggggttttctgggcctctccaatattaagttcaggccaggatctgtggtggtacaattgactctggccttccgagaaggtaccatcaatgtccacgacgtggagacacagttcaatcagtataaaacggaagcagcctctcgatataacctgacgatctcagacgtcagcgtgagtgatgtgccatttcctttctctgcccagtctggggctggggtgccaggctggggcatcgcgctgctggtgctggtctgtgttctggttgcgctggccattgtctatctcattgccttggctgtctgtcagtgccgccgaaagaactacgggcagctggacatctttccagcccgggatacctaccatcctatgagcgagtaccccacctaccacacccatgggcgctatgtgccccctagcagtaccgatcgtagcccctatgagaaggtttctgcaggtaatggtggcagcagcctctcttacacaaacccagcagtggcagccacttctgccaacttgtaggggcacgtcgcccgctgagctgagtggccagccagtgccattccactccactcaggttcttcagggccagagcccctgcaccctgtttgggctggtgagctgggagttcaggtgggctgctcacagcctccttcagaggccccaccaatttctcggacacttctcagtgtgtggaagctcatgtgggcccctgagggctcatgcctgggaagtgttgtggtgggggctcccaggaggactggcccagagagccctgagatagcggggatcctgaactggactgaataaaacgtggtctcccactgcgccaaaaaaaaaaaa

SEQ ID NO: 117 - protein, 255 aa, Homo sapiens
MTPGTQSPFFLLLLLTVLTVVTGSGHASSTPGGEKETSATQRSSVPSSTEKNAFNSSLEDPSTDYYQELQRDISEMFLQIYKQGGFLGLSNIKFRPGSVVVQLTLAFREGTINVHDVETQFNQYKTEAASRYNLTISDVSVSDVPFPFSAQSGAGVPGWGIALLVLVCVLVALAIVYLIALAVCQCRRKNYGQLDIFPARDTYHPMSEYPTYHTHGRYVPPSSTDRSPYEKVSAGNGGSSLSYTNPAVAATSANL

SEQ ID NO: 118 - DNA, 1209 bp, Homo sapiens
acctctcaagcagccagcgcctgcctgaatctgttctgccccctccccacccatttcaccaccaccatgacaccgggcacccagtctcctttcttcctgctgctgctcctcacagtgcttacagttgttacgggttctggtcatgcaagctctaccccaggtggagaaaaggagacttcggctacccagagaagttcagtgcccagctctactgagaagaatgctttgtctactggggtctctttctttttcctgtcttttcacatttcaaacctccagtttaattcctctctggaagatcccagcaccgactactaccaagagctgcagagagacatttctgaaatgtttttgcagatttataaacaagggggttttctgggcctctccaatattaagttcaggccaggatctgtggtggtacaattgactctggccttccgagaaggtaccatcaatgtccacgacgtggagacacagttcaatcagtataaaacggaagcagcctctcgatataacctgacgatctcagacgtcagcgtgagtgatgtgccatttcctttctctgcccagtctggggctggggtgccaggctggggcatcgcgctgctggtgctggtctgtgttctggttgcgctggccattgtctatctcattgccttggctgtctgtcagtgccgccgaaagaactacgggcagctggacatctttccagcccgggatacctaccatcctatgagcgagtaccccacctaccacacccatgggcgctatgtgccccctagcagtaccgatcgtagcccctatgagaaggtttctgcaggtaatggtggcagcagcctctcttacacaaacccagcagtggcagccacttctgccaacttgtaggggcacgtcgcccgctgagctgagtggccagccagtgccattccactccactcaggttcttcagggccagagcccctgcaccctgtttgggctggtgagctgggagttcaggtgggctgctcacagcctccttcagaggccccaccaatttctcggacacttctcagtgtgtggaagctcatgtgggcccctgagggctcatgcctgggaagtgttgtggtgggggctcccaggaggactggcccagagagccctgagatagcggggatcctgaactggactgaataaaacgtggtctcccactgcgccaaaaaaaaaaaa

SEQ ID NO: 119 - protein, 273 aa, Homo sapiens
MTPGTQSPFFLLLLLTVLTVVTGSGHASSTPGGEKETSATQRSSVPSSTEKNALSTGVSFFFLSFHISNLQFNSSLEDPSTDYYQELQRDISEMFLQIYKQGGFLGLSNIKFRPGSVVVQLTLAFREGTINVHDVETQFNQYKTEAASRYNLTISDVSVSDVPFPFSAQSGAGVPGWGIALLVLVCVLVALAIVYLIALAVCQCRRKNYGQLDIFPARDTYHPMSEYPTYHTHGRYVPPSSTDRSPYEKVSAGNGGSSLSYTNPAVAATSANL

SEQ ID NO: 120 - DNA, 2000 bp, Homo sapiens
cctgtgaacactatagcgctgagagagacagtctgaaagcagaggaagacatcgatcagtaacaccaagagacaccaaagttgaaagttttgttttctttccctctgttttatttttcccccgtgtgtccctactatggtcagaaagcctgttgtgtccaccatctccaaaggaggttacctgcagggaaatgttaacgggaggctgccttccctgggcaacaaggagccacctgggcaggagaaagtgcagctgaagaggaaagtcactttactgaggggagtctccattatcattggcaccatcattggagcaggaatcttcatctctcctaagggcgtgctccagaacacgggcagcgtgggcatgtctctgaccatctggacggtgtgtggggtcctgtcactatttggagctttgtcttatgctgaattgggaacaactataaagaaatctggaggtcattacacatatattttggaagtctttggtccattaccagcttttgtacgagtctgggtggaactcctcataatacgccctgcagctactgctgtgatatccctggcatttggacgctacattctggaaccattttttattcaatgtgaaatccctgaacttgcgatcaagctcattacagctgtgggcataactgtagtgatggtcctaaatagcatgagtgtcagctggagcgcccggatccagattttcttaaccttttgcaagctcacagcaattctgataattatagtccctggagttatgcagctaattaaaggtcaaacgcagaactttaaagacgccttttcaggaagagattcaagtattacgcggttgccactggctttttattatggaatgtatgcatatgctggctggttttacctcaactttgttactgaagaagtagaaaaccctgaaaaaaccattccccttgcaatatgtatatccatggccattgtcaccattggctatgtgctgacaaatgtggcctactttacgaccattaatgctgaggagctgctgctttcaaatgcagtggcagtgaccttttctgagcggctactgggaaatttctcattagcagttccgatctttgttgccctctcctgctttggctccatgaacggtggtgtgtttgctgtctccaggttattctatgttgcgtctcgagagggtcaccttccagaaatcctctccatgattcatgtccgcaagcacactcctctaccagctgttattgttttgcaccctttgacaatgataatgctcttctctggagacctcgacagtcttttgaatttcctcagttttgccaggtggctttttattgggctggcagttgctgggctgatttatcttcgatacaaatgcccagatatgcatcgtcctttcaaggtgccactgttcatcccagctttgttttccttcacatgcctcttcatggttgccctttccctctattcggacccatttagtacagggattggcttcgtcatcactctgactggagtccctgcgtattatctctttattatatgggacaagaaacccaggtggtttagaataatgtcagggttcctagcactgatgcctgcacaagcatgtgatatgtgaaataaaatggattcttctatagctaaatgagttccctctggggagagttctggtactgcaatcacaatgccagatggtgtttatgggctatttgtgtaagtaagtggtaagatgctatgaagtaagtgtgtttgttttcatcttatggaaactcttgatgcatgtgcttttgtatggaataaattttggtgcaatatgatgtcattcaactttgcattgaattgaattttggttgtatttatatgtattatacctgtcacgcttctagttgcttcaaccattttataaccatttttgtacatattttacttgaaaatattttaaatggaaatttaaataaacatttgatagtttacataataaaaaaaaaaaaaaaaaaa

SEQ ID NO: 121 - protein, 494 aa, Homo sapiens
MVRKPVVSTISKGGYLQGNVNGRLPSLGNKEPPGQEKVQLKRKVTLLRGVSIIIGTIIGAGIFISPKGVLQNTGSVGMSLTIWTVCGVLSLFGALSYAELGTTIKKSGGHYTYILEVFGPLPAFVRVWVELLIIRPAATAVISLAFGRYILEPFFIQCEIPELAIKLITAVGITVVMVLNSMSVSWSARIQIFLTFCKLTAILIIIVPGVMQLIKGQTQNFKDAFSGRDSSITRLPLAFYYGMYAYAGWFYLNFVTEEVENPEKTIPLAICISMAIVTIGYVLTNVAYFTTINAEELLLSNAVAVTFSERLLGNFSLAVPIFVALSCFGSMNGGVFAVSRLFYVASREGHLPEILSMIHVRKHTPLPAVIVLHPLTMIMLFSGDLDSLLNFLSFARWLFIGLAVAGLIYLRYKCPDMHRPFKVPLFIPALFSFTCLFMVALSLYSDPFSTGIGFVITLTGVPAYYLFIIWDKKPRWFRIMSGFLALMPAQACDM

SEQ ID NO: 122 - DNA, 9648 bp, Homo sapiens
ggtttgtaatgatagggcggcagcagcagcagcagcagcagtggtggaacgaggaggtggagaattgagagcacgatgcatacacaggtgtttctgagtagtaattagatcgctgtgaaggaaaaagcacacctttgagttttcacctgtgaacactatagcgctgagagagacagtctgaaagcagaggaagacatcgatcagtaacaccaagagacaccaaagttgaaagttttgttttctttccctctgttttatttttcccccgtgtgtccctactatggtcagaaagcctgttgtgtccaccatctccaaaggaggttacctgcagggaaatgttaacgggaggctgccttccctgggcaacaaggagccacctgggcaggagaaagtgcagctgaagaggaaagtcactttactgaggggagtctccattatcattggcaccatcattggagcaggaatcttcatctctcctaagggcgtgctccagaacacgggcagcgtgggcatgtctctgaccatctggacggtgtgtggggtcctgtcactatttggagctttgtcttatgctgaattgggaacaactataaagaaatctggaggtcattacacatatattttggaagtctttggtccattaccagcttttgtacgagtctgggtggaactcctcataatacgccctgcagctactgctgtgatatccctggcatttggacgctacattctggaaccattttttattcaatgtgaaatccctgaacttgcgatcaagctcattacagctgtgggcataactgtagtgatggtcctaaatagcatgagtgtcagctggagcgcccggatccagattttcttaaccttttgcaagctcacagcaattctgataattatagtccctggagttatgcagctaattaaaggtcaaacgcagaactttaaagacgccttttcaggaagagattcaagtattacgcggttgccactggctttttattatggaatgtatgcatatgctggctggttttacctcaactttgttactgaagaagtagaaaaccctgaaaaaaccattccccttgcaatatgtatatccatggccattgtcaccattggctatgtgctgacaaatgtggcctactttacgaccattaatgctgaggagctgctgctttcaaatgcagtggcagtgaccttttctgagcggctactgggaaatttctcattagcagttccgatctttgttgccctctcctgctttggctccatgaacggtggtgtgtttgctgtctccaggttattctatgttgcgtctcgagagggtcaccttccagaaatcctctccatgattcatgtccgcaagcacactcctctaccagctgttattgttttgcaccctttgacaatgataatgctcttctctggagacctcgacagtcttttgaatttcctcagttttgccaggtggctttttattgggctggcagttgctgggctgatttatcttcgatacaaatgcccagatatgcatcgtcctttcaaggtgccactgttcatcccagctttgttttccttcacatgcctcttcatggttgccctttccctctattcggacccatttagtacagggattggcttcgtcatcactctgactggagtccctgcgtattatctctttattatatgggacaagaaacccaggtggtttagaataatgtcagagaaaataaccagaacattacaaataatactggaagttgtaccagaagaagataagttatgaactaatggacttgagatcttggcaatctgcccaaggggagacacaaaatagggatttttacttcattttctgaaagtctagagaattacaactttggtgataaacaaaaggagtcagttatttttattcatatattttagcatattcgaactaatttctaagaaatttagttataactctatgtagttatagaaagtgaatatgcagttattctatgagtcgcacaattcttgagtctctgatacctacctattggggttaggagaaaagactagacaattactatgtggtcattctctacaacatatgttagcacggcaaagaaccttcaaattgaagactgagatttttctgtatatatgggttttgtaaagatggttttacacactatagatgtctatactgtgaaaagtgttttcaattctgaaaaaaagcatacatcatgattatggcaaagaggagagaaagaaatttattttacattgacattgcattgcttccccttagataccaatttagataacaaacactcatgctttaatggattatacccagagcactttgaacaaaggtcagtggggattgttgaatacattaaagaagagtttctaggggctactgtttatgagacacatccaggagttatgtttaagtaaaaatccttgagaatttattatgtcagatgttttttcattcattatcaggaagttttagttatctgtcatttttttttttcacatcagtttgatcaggaaagtgtataacacatcttagagcaagagttagtttggtattaaatcctcattagaacaaccacctgtttcactaataacttacccctgatgagtctatctaaacatatgcattttaagccttcaaattacattatcaacatgagagaaatcaccaacaaagaagatgttcaaaataatagtcccatatctgtaatcatatctacatgcaatgttagtaattctgaagttttttaaatttatggctatttttacacgatgatgaattttgacagtttgtgcattttctttatacattttatattcttctgttaaaatatctcttcagatgaaactgtccagattaattaggaaaaggcatatattaacataaaaattgcaaaagaaatgtcgctgtaaataagatttacaactgatgtttctagaaaatttccacttctatatctaggctttgtcagtaatttccacaccttaattatcattcaacttgcaaaagagacaactgataagaagaaaattgaaatgagaatctgtggataagtgtttgtgttcagaagatgttgttttgccagtattagaaaatactgtgagccgggcatggtggcttacatctgtaatcccagcactttgggaggctgagggggtggatcacctgaggtcgggagttctagaccagcctgaccaacatggagaaaccccatctctactaaaaatacaaaattagctgggcatggtggcacatgctggtaatctcagctattgaggaggctgaggcaggagaattgcttgaacccgggaggcggaggttgcagtgagccaagattgcaccactgtactccagcctgggtgacaaagtcagactccatctccaaaaaaaaaagattatatatatatatatatgtgtgtgtatgtgtgtgtgtgtgtgtgtgtgtatatatatatatatatatatacacacacacacacacactttttatatatatatatatatatatatagtggaacttacaaatgagagtaatataatgatgaaattttgaactgttatttataaacatctaaggtaaaatggttagtcatggccagagtatgtttcatcctttaatttttgtccatttgaaaataaggatttttgaaagaattataccaattaaaattattaaaggcaaacatagaattcataaaaaattgtccaaagtagaaatgatgacctataatttggagcatttccaattcagtaatttcaattttgctcttgaaaacatttaatatatatccaagactgacatttctttagctgaacctaacgtttgggtctctgagtgaatttataataactccttccttccttagcatagggttttcaaaatttgatttataattcctatttccagtaaatattgttcatttgtccacatctctccctatgatatgttgctggaggtaagaatttctttcatattcctattttttttttccccatagactaggctcatagaatttaaacaagcaaattttcctgagctttttcttgccaaatgaaagaagactggtaaattctcatagagaggtttgtgtagttcttggctcttcctggggttaatgtgcttatattcacagtggcaaattggtctcagactttaatttatttatttttgatttgaatttctctttaaaagtatcaatttaaaaggtaactagaattattctttctcattttcaaaagtgatttttgcattattaaatttccctgccattgtaatgccatttcacgcagaaaaaaagtcagccagtaattaagaaaaaaagtgatggagattaagtagtattttggcttatttttaggactcatcatgagaagacacagttcctttaatcaggaaattaatatccataattttcactcaaaattgcagtatgtaaagcagattctcaaaaactctcctgaacacttatttatatatatgtttttatataagtaaaatttttctcatatttttatacgatatgcacacacacacatacatgcacatactacttactacatgttctgtacttgtactttgtaccatgcatattcaaatgtttatatacataagtttattataacataaacagtaaaagtaatgaatactgtttaaaataactaatatagtattttttaatttttgtggggatggattctcaaatacttgtgattttaaaagattctaaagctaaaacacaacttgattttaaaaagaatgattctccttacacaattataaatatttgcagtaaatattttccttataatactgttttgaccccatttaaaaagtattagattatattcctttgatccaatgaaaactgaaccttataaatggttagctgaaagtagaccttattcttgtccttctttagaagagtaaagatttgtcctagggaagatggctgacttcggttcccaacatgcgtatgcatttagactgtagctcctcagccctgtggacacaaaatttggacagcttattaggttacgttagcaatgcatgacggtttctccaacactaagatattcacgttgaaacagatttcctgttcgtcttatgtgtctggtaaaattgtttccccaattacaatttgacatatcaatagagggttaacaagagtataattacataacagaattcctcatgaactgtaatcagtctacaggaaaatcattattttatcttgatttgcagatgaatatactgctaagaaagggagcaactctgacctttgttaaagttgatcttttgtaattgaggtataaggtatgaaaagataaaaaaccgaaggccagagaatcaggaaatgaaagatagtatggactgaaggtaacaatattttaatgttatgcaatatagtcagagaaatattaaaaattagttgtttgctgtgcataggtggatctcgcaggaagctaatgaaacctaagcttcagtgcctctcacttagacatgttccattcgaggtcctgaacctaactttgtattaggaattctgtactaattttgttgaagaagaccagcaaagttgtgtacacttctacccccacaaaatctgcattgtccatgtgagtaaagtaaaataattcctgttatttttttctgttagaaataagtatggaggatatgtttttaaaaatttatgagttaattgaaatatccatatataacaagtgactttctcacaatatatatgatgtgatatatagggagatagtttcactttcatcatattttatacgttgattctgaactatagaaaaataataaatgggattttaattatagctcttagttgggaaagaaatatagagagatgtgggatttgaatgcccatgaaagacattttattttacttgaatatattcttgcttcactttaccctccataatatgttgtacattagtgctgatcaagtttacagagttacattttgctttcctaaccattcagtcaggaattaaaatatggcattgtataacaactgggaagaagctcatagtggatataaattagagtagataatgggtcaccttgatagcctctgtttacattacttgtatatgggcaaaataattattacctatacgtgtatttaagcttaattttcatataaacagtatttttaatctatgttaaaatagataatatctaaaagtgtgatctctaggtagtccttagtttattagtactgtacttcaaaaagatttttaaataggtccggcacggtggctcatgcctgtaatcccagcactttgggaggctgaggcgggcgaatcacctgaggtcaggagttcgagatcagcctggccaacatggtgaaaccctgtctcaactaaaaatataaaaattagccgggcgtggtggcaggcgcctgtaatcccagctactcgggaggctgaggcaggagaatcacttgaacccaaggggcagaagctgcagttagccaagatcgcatcattgcactccagcctaggggacaagagcgcgagacttcatctcaaaaaaaaaaaaaaaaaaaaaaaaagatttttaaataatagctaaaggtatgctctctaggtcatccttagtttattagtactgtacttaaaaattattttttaatagtcaattttgggagataattatttctttccttatattttccaattagttggtgtctaaaaataaatgttttgtctaattttagatcaggtatacattcacaaaagcataaatcatagtctcacaggaaattcaccaattttccatatgtcgtgagataactgtcctttctacaacctcataacaatgaatttatataattacctagattttcttagtgtgaatctacccattagttttattttcttggtagttatttttttccctcctctctgttactattggccttaaaatacacagaggacggttacagtgtcctaatagctgttacatgtgtgtgtttcagcgtacttgaatcaagtgtacatttatagtaccaataaccgcctttacagctttacagttaacaattctctcacaaaactgtagagcattaggcatctgagagccatagagggccaactttgttccagagtgaacatgctttttttcctcaacatatacactactgattttttttaaaagtatgactttcaagtgaattaatgtattggttaggagaactgcttgctaagtccttattacctcttgttaaagcctcagaaggccgtgctgaaagccagaggggaaaaaaagagtaatgcacaggtatctcttttgcagtggtgactgtattttgagtaccttgtgtgacagggtattattacagcatcttgtgggaaaacctattaggcctttgcatgttaaagctgtataatttgttgggttgtgagtggtctgacttaaatgtgtattataaaatttagacatcaaattttcctactaactaactttattagatgcatacttggaagcacagtcatatcacactgggaggcaatgcaatgtggttacctggtcctaggtttgaactgtcttatttcaaaagatttctgaattaatttttccctagaatttctccttcattccaaagtacaaacatactttgaagaatgaaacagattgttcccatgaatgtatgctcatactcgactagaaacgatctatgttaaatgactgtgtatatgaattatttcaagtactaccccaaataactttcttattgctctgaaagaagaaaagcaatgtaaatcactatgattattgcacaaacaaccagaattctccaacaattttaagtaatctgatcctcttcttggagaaaattgttacctaatagtttttccttatgaatgttattactactggtataaatcaaatttctataaatttcctacttaagtcttaagaactgggttcttcctttgatgttattcatgttcagaaaggaaacaacactttactcttttaggacaattcctagaatctatagtagtatcaggatatattttgctttaaaatatattttggttattttgaatacagacattggctccaaattttcatctttgcacaatagtatgacttttcactagaacttctcaacatttgggaactttgcaaatatgagcatcatatgtgttaaggctgtatcatttaatgctatgagatacattgttttctccctatgccaaacaggtgaacaaacgtagttgttttttactgatactaaatgttggctacctgtgattttatagtatgcacatgtcagaaaaaggcaagacaaatggcctcttgtactgaatacttcggcaaacttattgggtcttcattttctgacagacaggatttgactcaatatttgtagagcttgcgtagaatggattacatggtagtgatgcactggtagaaatggtttttagttattgactcagaattcatctcaggatgaatcttttatgtctttttattgtaagcatatctgaatttactttataaagatggttttagaaagctttgtctaaaaatttggcctaggaatggtaacttcattttcagttgccaaggggtagaaaaataatatgtgtgttgttatgtttatgttaacatattattaggtactatctatgaatgtatttaaatatttttcatattctgtgacaagcatttataatttgcaacaagtggagtccatttagcccagtgggaaagtcttggaactcaggttacccttgaaggatatgctggcagccatctctttgatctgtgcttaaactgtaatttatagaccagctaaatccctaacttggatctggaatgcattagttatgaccttgtaccattcccagaatttcaggggcatcgtgggtttggtctagtgattgaaaacacaagaacagagagatccagctgaaaaagagtgatcctcaatatcctaactaactggtcctcaactcaagcagagtttcttcactctggcactgtgatcatgaaacttagtagaggggattgtgtgtattttatacaaatttaatacaatgtcttacattgataaaattcttaaagagcaaaactgcattttatttctgcatccacattccaatcatattagaactaagatatttatctatgaagatataaatggtgcagagagactttcatctgtggattgcgttgtttcttagggttcctagcactgatgcctgcacaagcatgtgatatgtgaaataaaatggattcttctatagctaaatgagttccctctggggagagttctggtactgcaatcacaatgccagatggtgtttatgggctatttgtgtaagtaagtggtaagatgctatgaagtaagtgtgtttgttttcatcttatggaaactcttgatgcatgtgcttttgtatggaataaattttggtgcaatatgatgtcattcaactttgcattgaattgaattttggttgtatttatatgtattatacctgtcacgcttctagttgcttcaaccattttataaccatttttgtacatattttacttgaaaatattttaaatggaaatttaaataaacatttgatagtttacataataa

SEQ ID NO: 123 - protein, 501 aa, Homo sapiens
MVRKPVVSTISKGGYLQGNVNGRLPSLGNKEPPGQEKVQLKRKVTLLRGVSIIIGTIIGAGIFISPKGVLQNTGSVGMSLTIWTVCGVLSLFGALSYAELGTTIKKSGGHYTYILEVFGPLPAFVRVWVELLIIRPAATAVISLAFGRYILEPFFIQCEIPELAIKLITAVGITVVMVLNSMSVSWSARIQIFLTFCKLTAILIIIVPGVMQLIKGQTQNFKDAFSGRDSSITRLPLAFYYGMYAYAGWFYLNFVTEEVENPEKTIPLAICISMAIVTIGYVLTNVAYFTTINAEELLLSNAVAVTFSERLLGNFSLAVPIFVALSCFGSMNGGVFAVSRLFYVASREGHLPEILSMIHVRKHTPLPAVIVLHPLTMIMLFSGDLDSLLNFLSFARWLFIGLAVAGLIYLRYKCPDMHRPFKVPLFIPALFSFTCLFMVALSLYSDPFSTGIGFVITLTGVPAYYLFIIWDKKPRWFRIMSEKITRTLQIILEVVPEEDKL

SEQ ID NO: 124 - DNA, 911 bp, Homo sapiens
gactccagaggaggaagtccagagacagagcaccatgacttctgagaaaggtccttcaaccggtgaccccactctgaggagaagaatcgaaccctgggagtttgacgtcttctatgaccccagagaacttcgtaaagaggcctgtctgctctacgaaatcaagtggggcatgagccggaagatctggcgaagctcaggcaaaaacaccaccaatcacgtggaagttaattttataaaaaaatttacgtcagaaagagattttcacccatccatgagctgctccatcacctggttcttgtcctggagtccctgctgggaatgctcccaggctattagagagtttctgagtcggcaccctggtgtgactctagtgatctacgtagctcggcttttttggcacatggatcaacaaaatcggcaaggtctcagggaccttgttaacagtggagtaactattcagattatgagagcatcagagtattatcactgctggaggaattttgtcaactacccacctggggatgaagctcactggccacaatacccacctctgtggatgatgttgtacgcactggagctgcactgcataattctaagtcttccaccctgtttaaagatttcaagaagatggcaaaatcatcttacatttttcagacttcatcttcaaaactgccattaccaaacgattccgccacacatccttttagctacagggctgatacatccttctgtggcttggagatgaataggatgattccgtgtgtgtactgattcaagaacaagcaatgatgacccactaaagagtgaatgccatttagaatctagaaatgttcacaaggtaccccaaaactctgtagcttaaaccaacaataaatatgtattacctctggcaaaaaaaaaaaaaaaaaaaa

SEQ ID NO: 125 - protein, 236 aa, Homo sapiens
MTSEKGPSTGDPTLRRRIEPWEFDVFYDPRELRKEACLLYEIKWGMSRKIWRSSGKNTTNHVEVNFIKKFTSERDFHPSMSCSITWFLSWSPCWECSQAIREFLSRHPGVTLVIYVARLFWHMDQQNRQGLRDLVNSGVTIQIMRASEYYHCWRNFVNYPPGDEAHWPQYPPLWMMLYALELHCIILSLPPCLKISRRWQNHLTFFRLHLQNCHYQTIPPHILLATGLIHPSVAWR

SEQ ID NO: 126 - DNA, 1972 bp, Homo sapiens
gaaactcccgcctggccaccataaaagcgccggccctccgcttccccgcgagacgaaacttcccgtcccggcggctctggcacccagggtccggcctgcgccttcccgccaggcctggacactggttcaacacctgtgacttcatgtgtgcgcgccggccacacctgcagtcacacctgtagccccctctgccaagagatccataccgaggcagcgtcggtggctacaagccctcagtccacacctgtggacacctgtgacacctggccacacgacctgtggccgcggcctggcgtctgctgcgacaggagcccttacctcccctgttataacacctgaccgccacctaactgcccctgcagaaggagcaatggccttggctcctgagagggcagccccacgcgtgctgttcggagagtggctccttggagagatcagcagcggctgctatgaggggctgcagtggctggacgaggcccgcacctgtttccgcgtgccctggaagcacttcgcgcgcaaggacctgagcgaggccgacgcgcgcatcttcaaggcctgggctgtggcccgcggcaggtggccgcctagcagcaggggaggtggcccgccccccgaggctgagactgcggagcgcgccggctggaaaaccaacttccgctgcgcactgcgcagcacgcgtcgcttcgtgatgctgcgggataactcgggggacccggccgacccgcacaaggtgtacgcgctcagccgggagctgtgctggcgagaaggcccaggcacggaccagactgaggcagaggcccccgcagctgtcccaccaccacagggtgggcccccagggccattcctggcacacacacatgctggactccaagccccaggccccctccctgccccagctggtgacaagggggacctcctgctccaggcagtgcaacagagctgcctggcagaccatctgctgacagcgtcatggggggcagatccagtcccaaccaaggctcctggagagggacaagaagggcttcccctgactggggcctgtgctggaggcccagggctccctgctggggagctgtacgggtgggcagtagagacgacccccagccccgggccccagcccgcggcactaacgacaggcgaggccgcggccccagagtccccgcaccaggcagagccgtacctgtcaccctccccaagcgcctgcaccgcggtgcaagagcccagcccaggggcgctggacgtgaccatcatgtacaagggccgcacggtgctgcagaaggtggtgggacacccgagctgcacgttcctatacggccccccagacccagctgtccgggccacagacccccagcaggtagcattccccagccctgccgagctcccggaccagaagcagctgcgctacacggaggaactgctgcggcacgtggcccctgggttgcacctggagcttcgggggccacagctgtgggcccggcgcatgggcaagtgcaaggtgtactgggaggtgggcggacccccaggctccgccagcccctccaccccagcctgcctgctgcctcggaactgtgacacccccatcttcgacttcagagtcttcttccaagagctggtggaattccgggcacggcagcgccgtggctccccacgctataccatctacctgggcttcgggcaggacctgtcagctgggaggcccaaggagaagagcctggtcctggtgaagctggaaccctggctgtgccgagtgcacctagagggcacgcagcgtgagggtgtgtcttccctggatagcagcagcctcagcctctgcctgtccagcgccaacagcctctatgacgacatcgagtgcttccttatggagctggagcagcccgcctagaacccagtctaatgagaactccagaaagctggagcagcccacctagagctggccgcggccgcccagtctaataaaaagaactccagaaca

SEQ ID NO: 127 - protein, 503 aa, Homo sapiens
MALAPERAAPRVLFGEWLLGEISSGCYEGLQWLDEARTCFRVPWKHFARKDLSEADARIFKAWAVARGRWPPSSRGGGPPPEAETAERAGWKTNFRCALRSTRRFVMLRDNSGDPADPHKVYALSRELCWREGPGTDQTEAEAPAAVPPPQGGPPGPFLAHTHAGLQAPGPLPAPAGDKGDLLLQAVQQSCLADHLLTASWGADPVPTKAPGEGQEGLPLTGACAGGPGLPAGELYGWAVETTPSPGPQPAALTTGEAAAPESPHQAEPYLSPSPSACTAVQEPSPGALDVTIMYKGRTVLQKVVGHPSCTFLYGPPDPAVRATDPQQVAFPSPAELPDQKQLRYTEELLRHVAPGLHLELRGPQLWARRMGKCKVYWEVGGPPGSASPSTPACLLPRNCDTPIFDFRVFFQELVEFRARQRRGSPRYTIYLGFGQDLSAGRPKEKSLVLVKLEPWLCRVHLEGTQREGVSSLDSSSLSLCLSSANSLYDDIECFLMELEQPA

SEQ ID NO: 128 - DNA, 1885 bp, Homo sapiens
gaaactcccgcctggccaccataaaagcgccggccctccgcttccccgcgagacgaaacttcccgtcccggcggctctggcacccagggtccggcctgcgccttcccgccaggcctggacactggttcaacacctgtgacttcatgtgtgcgcgccggccacacctgcagtcacacctgtagccccctctgccaagagatccataccgaggcagcgtcggtggctacaagccctcagtccacacctgtggacacctgtgacacctggccacacgacctgtggccgcggcctggcgtctgctgcgacaggagcccttacctcccctgttataacacctgaccgccacctaactgcccctgcagaaggagcaatggccttggctcctgagagggcagccccacgcgtgctgttcggagagtggctccttggagagatcagcagcggctgctatgaggggctgcagtggctggacgaggcccgcacctgtttccgcgtgccctggaagcacttcgcgcgcaaggacctgagcgaggccgacgcgcgcatcttcaaggcctgggctgtggcccgcggcaggtggccgcctagcagcaggggaggtggcccgccccccgaggctgagactgcggagcgcgccggctggaaaaccaacttccgctgcgcactgcgcagcacgcgtcgcttcgtgatgctgcgggataactcgggggacccggccgacccgcacaaggtgtacgcgctcagccgggagctgtgctggcgagaaggcccaggcacggaccagactgaggcagaggcccccgcagctgtcccaccaccacagggtgggcccccagggccattcctggcacacacacatgctggactccaagccccaggccccctccctgccccagctggtgacaagggggacctcctgctccaggcagtgcaacagagctgcctggcagaccatctgctgacagcgtcatggggggcagatccagtcccaaccaaggctcctggagagggacaagaagggcttcccctgactggggcctgtgctggaggcgaggccgcggccccagagtccccgcaccaggcagagccgtacctgtcaccctccccaagcgcctgcaccgcggtgcaagagcccagcccaggggcgctggacgtgaccatcatgtacaagggccgcacggtgctgcagaaggtggtgggacacccgagctgcacgttcctatacggccccccagacccagctgtccgggccacagacccccagcaggtagcattccccagccctgccgagctcccggaccagaagcagctgcgctacacggaggaactgctgcggcacgtggcccctgggttgcacctggagcttcgggggccacagctgtgggcccggcgcatgggcaagtgcaaggtgtactgggaggtgggcggacccccaggctccgccagcccctccaccccagcctgcctgctgcctcggaactgtgacacccccatcttcgacttcagagtcttcttccaagagctggtggaattccgggcacggcagcgccgtggctccccacgctataccatctacctgggcttcgggcaggacctgtcagctgggaggcccaaggagaagagcctggtcctggtgaagctggaaccctggctgtgccgagtgcacctagagggcacgcagcgtgagggtgtgtcttccctggatagcagcagcctcagcctctgcctgtccagcgccaacagcctctatgacgacatcgagtgcttccttatggagctggagcagcccgcctagaacccagtctaatgagaactccagaaagctggagcagcccacctagagctggccgcggccgcccagtctaataaaaagaactccagaaca

SEQ ID NO: 129 - protein, 474 aa, Homo sapiens
MALAPERAAPRVLFGEWLLGEISSGCYEGLQWLDEARTCFRVPWKHFARKDLSEADARIFKAWAVARGRWPPSSRGGGPPPEAETAERAGWKTNFRCALRSTRRFVMLRDNSGDPADPHKVYALSRELCWREGPGTDQTEAEAPAAVPPPQGGPPGPFLAHTHAGLQAPGPLPAPAGDKGDLLLQAVQQSCLADHLLTASWGADPVPTKAPGEGQEGLPLTGACAGGEAAAPESPHQAEPYLSPSPSACTAVQEPSPGALDVTIMYKGRTVLQKVVGHPSCTFLYGPPDPAVRATDPQQVAFPSPAELPDQKQLRYTEELLRHVAPGLHLELRGPQLWARRMGKCKVYWEVGGPPGSASPSTPACLLPRNCDTPIFDFRVFFQELVEFRARQRRGSPRYTIYLGFGQDLSAGRPKEKSLVLVKLEPWLCRVHLEGTQREGVSSLDSSSLSLCLSSANSLYDDIECFLMELEQPA

SEQ ID NO: 130 - DNA, 2051 bp, Homo sapiens
agggtgcgaagcgccactgtttaggtttcgctttcccgggagcctgacccgcccctgacgtcgcctttcccgtctccgcagggtccggcctgcgccttcccgccaggcctggacactggttcaacacctgtgacttcatgtgtgcgcgccggccacacctgcagtcacacctgtagccccctctgccaagagatccataccgaggcagcgtcggtggctacaagccctcagtccacacctgtggacacctgtgacacctggccacacgacctgtggccgcggcctggcgtctgctgcgacaggagcccttacctcccctgttataacacctgaccgccacctaactgcccctgcagaaggagcaatggccttggctcctgagaggtaagagcccggcccaccctctccagatgccagtccccgagcgccctgcagccggccctgactctccgcggccgggcacccgcagggcagccccacgcgtgctgttcggagagtggctccttggagagatcagcagcggctgctatgaggggctgcagtggctggacgaggcccgcacctgtttccgcgtgccctggaagcacttcgcgcgcaaggacctgagcgaggccgacgcgcgcatcttcaaggcctgggctgtggcccgcggcaggtggccgcctagcagcaggggaggtggcccgccccccgaggctgagactgcggagcgcgccggctggaaaaccaacttccgctgcgcactgcgcagcacgcgtcgcttcgtgatgctgcgggataactcgggggacccggccgacccgcacaaggtgtacgcgctcagccgggagctgtgctggcgagaaggcccaggcacggaccagactgaggcagaggcccccgcagctgtcccaccaccacagggtgggcccccagggccattcctggcacacacacatgctggactccaagccccaggccccctccctgccccagctggtgacaagggggacctcctgctccaggcagtgcaacagagctgcctggcagaccatctgctgacagcgtcatggggggcagatccagtcccaaccaaggctcctggagagggacaagaagggcttcccctgactggggcctgtgctggaggcccagggctccctgctggggagctgtacgggtgggcagtagagacgacccccagccccgggccccagcccgcggcactaacgacaggcgaggccgcggccccagagtccccgcaccaggcagagccgtacctgtcaccctccccaagcgcctgcaccgcggtgcaagagcccagcccaggggcgctggacgtgaccatcatgtacaagggccgcacggtgctgcagaaggtggtgggacacccgagctgcacgttcctatacggccccccagacccagctgtccgggccacagacccccagcaggtagcattccccagccctgccgagctcccggaccagaagcagctgcgctacacggaggaactgctgcggcacgtggcccctgggttgcacctggagcttcgggggccacagctgtgggcccggcgcatgggcaagtgcaaggtgtactgggaggtgggcggacccccaggctccgccagcccctccaccccagcctgcctgctgcctcggaactgtgacacccccatcttcgacttcagagtcttcttccaagagctggtggaattccgggcacggcagcgccgtggctccccacgctataccatctacctgggcttcgggcaggacctgtcagctgggaggcccaaggagaagagcctggtcctggtgaagctggaaccctggctgtgccgagtgcacctagagggcacgcagcgtgagggtgtgtcttccctggatagcagcagcctcagcctctgcctgtccagcgccaacagcctctatgacgacatcgagtgcttccttatggagctggagcagcccgcctagaacccagtctaatgagaactccagaaagctggagcagcccacctagagctggccgcggccgcccagtctaataaaaagaactccagaaca

SEQ ID NO: 131 - protein, 516 aa, Homo sapiens
MPVPERPAAGPDSPRPGTRRAAPRVLFGEWLLGEISSGCYEGLQWLDEARTCFRVPWKHFARKDLSEADARIFKAWAVARGRWPPSSRGGGPPPEAETAERAGWKTNFRCALRSTRRFVMLRDNSGDPADPHKVYALSRELCWREGPGTDQTEAEAPAAVPPPQGGPPGPFLAHTHAGLQAPGPLPAPAGDKGDLLLQAVQQSCLADHLLTASWGADPVPTKAPGEGQEGLPLTGACAGGPGLPAGELYGWAVETTPSPGPQPAALTTGEAAAPESPHQAEPYLSPSPSACTAVQEPSPGALDVTIMYKGRTVLQKVVGHPSCTFLYGPPDPAVRATDPQQVAFPSPAELPDQKQLRYTEELLRHVAPGLHLELRGPQLWARRMGKCKVYWEVGGPPGSASPSTPACLLPRNCDTPIFDFRVFFQELVEFRARQRRGSPRYTIYLGFGQDLSAGRPKEKSLVLVKLEPWLCRVHLEGTQREGVSSLDSSSLSLCLSSANSLYDDIECFLMELEQPA

SEQ ID NO: 132 - DNA, 4151 bp, Homo sapiens
gggaatagcagaataggagcaagccagcactagtcagctaactaagtgactcaaccaaggccttttttccttgttatctttgcagatacttcattttcttagcgtttctggagattacaacatcctgcggttccgtttctgggaactttactgatttatctcccccctcacacaaataagcattgattcctgcatttctgaagatctcaagatctggactactgttgaaaaaatttccagtgaggctcacttatgtctgtaaagatgggaaaaaaatacaagaacattgttctactaaaaggattagaggtcatcaatgattatcattttagaatggttaagtccttactgagcaacgatttaaaacttaatttaaaaatgagagaagagtatgacaaaattcagattgctgacttgatggaagaaaagttccgaggtgatgctggtttgggcaaactaataaaaattttcgaagatataccaacgcttgaagacctggctgaaactcttaaaaaagaaaagttaaaagtaaaaggaccagccctatcaagaaagaggaagaaggaagtgcatgctacttcacctgcaccctccacaagcagcactgtcaaaactgaaggagcagaggcaactcctggagctcagaaaagaaaaaaatcaaccaaagaaaaggctggacccaaagggagtaaggtgtccgaggaacagactcagcctccctctcctgcaggagccggcatgtccacagccatgggccgttccccatctcccaagacctcattgtcagctccacccaacagttcttcaactgagaacccgaaaacagtggccaaatgtcaggtaactcccagaagaaatgttctccaaaaacgcccagtgatagtgaaggtactgagtacaacaaagccatttgaatatgagaccccagaaatggagaaaaaaataatgtttcatgctacagtggctacacagacacagttcttccatgtgaaggttttaaacaccagcttgaaggagaaattcaatggaaagaaaatcatcatcatatcagattatttggaatatgatagtctcctagaggtcaatgaagaatctactgtatctgaagctggtcctaaccaaacgtttgaggttccaaataaaatcatcaacagagcaaaggaaactctgaagattgatattcttcacaaacaagcttcaggaaatattgtatatggggtatttatgctacataagaaaacagtaaatcagaagaccacaatctacgaaattcaggatgatagaggaaaaatggatgtagtggggacaggacaatgtcacaatatcccctgtgaagaaggagataagctccagcttttctgctttcgacttagaaaaaagaaccagatgtcaaaactgatttcagaaatgcatagttttatccagataaagaaaaaaacaaacccgagaaacaatgaccccaagagcatgaagctaccccaggaacagcgtcagcttccatatccttcagaggccagcacaaccttccctgagagccatcttcggactcctcagatgccaccaacaactccatccagcagtttcttcaccaagaaaagtgaagacacaatctccaaaatgaatgacttcatgaggatgcagatactgaaggaagggagtcattttccaggaccgttcatgaccagcataggcccagctgagagccatccccacactcctcagatgcctccatcaacaccaagcagcagtttcttaaccacgttgaaaccaagactgaagactgaacctgaagaagtttccatagaagacagtgcccagagtgacctcaaagaagtgatggtgctgaacgcaacagaatcatttgtatatgagcccaaagagcagaagaaaatgtttcatgccacagtggcaactgagaatgaagtcttccgagtgaaggtttttaatattgacctaaaggagaagttcaccccaaagaagatcattgccatagcaaattatgtttgccgcaatgggttcctggaggtatatcctttcacacttgtggctgatgtgaatgctgaccgaaacatggagatcccaaaaggattgattagaagtgccagcgtaactcctaaaatcaatcagctttgctcacaaactaaaggaagttttgtgaatggggtgtttgaggtacataaggtaagcccacaccattgttttataaaatttctcctgcaacctccaatttttaaagtcttaacttgtcaactggagtttggtcaacttactcaacacagaaaatcaaccccttcacccttcccccagcactagagataattgaatagagttcatttcaggatatggggtacgttatattgtaacattcctcttcttaaggtatcatcatgcaagttatttagacagtcactaggaaacttggcattttattagttttgatgatctattcagagccacccttgtccaggacagtgcagagtttatatcaacacacatatccttaggattttgtttctttgagttcttctccatctgtatcaatgacaacttaatttaattgtgaataaaagagttgctctcccaagcctgaatcctgattgtgacaaccagagtaagaaataaaatagactactctgctttagaatgcagctatgtctaacagttagctagaattctgatcatttggactccaaagtttcttgcctcttctcattcattaattcatcaggagactgtagagcaactaacttctgcattaaataataagagaaatacgaagcaaaaagactaaaaaagtcacgtagcttaactgctcaatttataaatggggcaataaaatgcaaaaaaaaagaaaaaaagcttggtgaattcttaggcttacagtgtgcctttcagtctctacacatcatgtaaatattatgcttagctgatttaacttcttgtttgaagtactgtttcatactccattatacatgtcttctagggtggcttacttttaattgtgctgttttctctacactcagtttaaatgactgtacatatatatgtggttggagagttaatgaataatgagctacaaaccagaacaatgtgactagatagataggatgatctagaattgagaactggcagattgggaaaagagtggctatatggagaaagaaagaaagtagttccatattgaaataacagtctacttaatgaggaccgttgcaacattctttctcaaacttacaaagtgccataaaaagcctctattctctgctcttgggcaggtgtgaaagaaacctaccaaattaatcagatttttctgtatccaggctccttaaaaaatcccagctgtgctgatgtggaaacaggaagaattaggaaagtaatcaattttttttcctagaaaaaatccagcagacaaagaacttcaacaaaagaggctcaagggaggagttgaaaggcaggattcaaagaccaagtatcttaagctatttggtacctgttattcaggacctacagctctgtttactctatcaaagaccaaaagtttccagaaacaccctgtatttctcatagatttgaaaattattgatccagtttcagaagataagtgttaattttcttttgcagaaaaatgtaaggggtgaattcacttattatgaaatacaagataatacagggaagatggaagtggtggtgcatggacgactgaccacaatcaactgtgaggaaggagataaactgaaactcacctgctttgaattggcaccgaaaagtgggaataccggggagttgagatctgtaattcatagtcacatcaaggtcatcaagaccaggaaaaacaagaaagacatactcaatcctgattccaagtatggaaacttcaccagactttttcttctaaaatctggatgtcattgacgataatgtttatggagataaggtctaagtgcctaaaaaaatgtacatatacctggttgaaatacaacactatacatacacaccaccatatatactagctgttaatcctatggaatggggtattgggagtgcttttttaatttttcatagtttttttttaataaaatggcatattttgcatctacaacttctataatttgaaaaaataaataaacattatcttttttgtgaaaaaaaaa

SEQ ID NO: 133 - protein, 682 aa, Homo sapiens
MGKKYKNIVLLKGLEVINDYHFRMVKSLLSNDLKLNLKMREEYDKIQIADLMEEKFRGDAGLGKLIKIFEDIPTLEDLAETLKKEKLKVKGPALSRKRKKEVHATSPAPSTSSTVKTEGAEATPGAQKRKKSTKEKAGPKGSKVSEEQTQPPSPAGAGMSTAMGRSPSPKTSLSAPPNSSSTENPKTVAKCQVTPRRNVLQKRPVIVKVLSTTKPFEYETPEMEKKIMFHATVATQTQFFHVKVLNTSLKEKFNGKKIIIISDYLEYDSLLEVNEESTVSEAGPNQTFEVPNKIINRAKETLKIDILHKQASGNIVYGVFMLHKKTVNQKTTIYEIQDDRGKMDVVGTGQCHNIPCEEGDKLQLFCFRLRKKNQMSKLISEMHSFIQIKKKTNPRNNDPKSMKLPQEQRQLPYPSEASTTFPESHLRTPQMPPTTPSSSFFTKKSEDTISKMNDFMRMQILKEGSHFPGPFMTSIGPAESHPHTPQMPPSTPSSSFLTTLKPRLKTEPEEVSIEDSAQSDLKEVMVLNATESFVYEPKEQKKMFHATVATENEVFRVKVFNIDLKEKFTPKKIIAIANYVCRNGFLEVYPFTLVADVNADRNMEIPKGLIRSASVTPKINQLCSQTKGSFVNGVFEVHKVSPHHCFIKFLLQPPIFKVLTCQLEFGQLTQHRKSTPSPFPQH

SEQ ID NO: 134 - DNA, 3597 bp, Homo sapiens
ggcgcgggcagggagcggctggctgtcagctgagccgcgctgggcggggtcgccaggccgcgcatcagccctaggcaccccagtcccggctgccccctccgccaccgccgccgcccgccggcaggttccctggtcagcgtcccatcccggtcgggagttctctccaggcggcacgatgccgaggaaacagtgaccctgagcgaagccaagccgggcggcaggtgtggctttgatagctggtggtgccacttcctggccttggatgagccgtacgcctctgtaaacccaacttcctcacctttgaaacagctgcctggttcagcattaatgaagattagtcagtgacaggcctggtgtgctgagtccgcacatagaagaatcaaaaatgtccaaaatgtaactggagagaaagtgggcaacttttggagtgacttttccacaggaacttctgcaatgtcccatcaacctctcagctgcctcactgaaaaggaggacagccccagtgaaagcacaggaaatggacccccccacctggcccacccaaacctggacacgtttaccccggaggagctgctgcagcagatgaaagagctcctgaccgagaaccaccagctgaaagaagccatgaagctaaataatcaagccatgaaagggagatttgaggagctttcggcctggacagagaaacagaaggaagaacgccagttttttgagatacagagcaaagaagcaaaagagcgtctaatggccttgagtcatgagaatgagaaattgaaggaagagcttggaaaactaaaagggaaatcagaaaggtcatctgaggaccccactgatgactccaggcttcccagggccgaagcggagcaggaaaaggaccagctcaggacccaggtggtgaggctacaagcagagaaggcagacctgttgggcatcgtgtctgaactgcagctcaagctgaactccagcggctcctcagaagattcctttgttgaaattaggatggctgaaggagaagcagaagggtcagtaaaagaaatcaagcatagtcctgggcccacgagaacagtctccactggcacggcattgtctaaatataggagcagatctgcagatggggccaagaattacttcgaacatgaggagttaactgtgagccagctcctgctgtgcctaagggaagggaatcagaaggtggagagacttgaagttgcactcaaggaggccaaagaaagagtttcagattttgaaaagaaaacaagtaatcgttctgagattgaaacccagacagaggggagcacagagaaagagaatgatgaagagaaaggcccggagactgttggaagcgaagtggaagcactgaacctccaggtgacatctctgtttaaggagcttcaagaggctcatacaaaactcagcgaagctgagctaatgaagaagagacttcaagaaaagtgtcaggcccttgaaaggaaaaattctgcaattccatcagagttgaatgaaaagcaagagcttgtttatactaacaaaaagttagagctacaagtggaaagcatgctatcagaaatcaaaatggaacaggctaaaacagaggatgaaaagtccaaattaactgtgctacagatgacacacaacaagcttcttcaagaacataataatgcattgaaaacaattgaggaactaacaagaaaagagtcagaaaaagtggacagggcagtgctgaaggaactgagtgaaaaactggaactggcagagaaggctctggcttccaaacagctgcaaatggatgaaatgaagcaaaccattgccaagcaggaagaggacctggaaaccatgaccatcctcagggctcagatggaagtttactgttctgattttcatgctgaaagagcagcgagagagaaaattcatgaggaaaaggagcaactggcattgcagctggcagttctgctgaaagagaatgatgctttcgaagacggaggcaggcagtccttgatggagatgcagagtcgtcatggggcgagaacaagtgactctgaccagcaggcttaccttgttcaaagaggagctgaggacagggactggcggcaacagcggaatattccgattcattcctgccccaagtgtggagaggttctgcctgacatagacacgttacagattcacgtgatggattgcatcatttaagtgttgatgtatcacctccccaaaactgttggtaaatgtcagattttttcctccaagagttgtgcttttgtgttatttgttttcactcaaatattttgcctcattattcttgttttaaaagaaagaaaacaggccgggcacagtggctcatgcctgtaatcccagcactttgggaggtcgaggtgggtggatcacttggggtcagggtttgagaccagcctggccaacatggcggaaccctgtctctaccaaaattacaaaaattagccgagcatggtggcgcatgcctgtagtcgcagctactcgcgaggttgaggcaggagaattgcttgaacccaggaagtggcagttgcagtgagccgagacgacaccactgcactccagcctgggtgacagagggagactctgtctcgaaagaaagaaagaaaaaaaggaaggaaggagaaggaaggaaggagaagaaaaggtacctgttctacgtagaacacctttggtggagttccatcaactcgcaaagtagaatccttacctactactcttctgataataattttaatattttttatgtttggttgatgcgagcagctgcactgctcatgcagttagctagcatgtgacatcatgtgacaaagttcatgtaattagatggaagaaacctcactgattaattttaagaaccttttagggatgcaggaacaatgaagtggccacagtatgtgctgtttttgaagcatttttaaaaacgaattgtagttgtttttcttcatttaaaatggatctgttggaggttatgtgtgtatgttgtagttttattgcagccacaataattttaccaaagttttcacataggcagttagcctttacttaatatcaagacaagtgaaaaaatattggcatcgatgaaaccgataacattggcctcattggatttctttacccattcacagtgtaaagaagttaccttcatgctttcattgtacctgcaggcctgtgggcttgtacagtagataattaatttctaaaaagaacagctgcctattttcttcctaggttaggttatatcttcataatcacaagaattagtgatggcaaaataaaattttgcttatgaatcttttacattgtttatatatgattaatatcatcatatatattttctgtattaagctcatttggcttcatttaagctgtatacttagtcatatatctttcattagttctatggatatgagcagatccctttactggagcccagtatgtgctgtgtgagttagaagtcattcttgctgagaaggtgaataggtagggatttgccttgttttgtaagtctacaatttgccaagagtaaataacactggaccagctgtaaaagtaaacagtgtgtttatgcattgagatactaaagcattt

SEQ ID NO: 135 - protein, 577 aa, Homo sapiens
MSHQPLSCLTEKEDSPSESTGNGPPHLAHPNLDTFTPEELLQQMKELLTENHQLKEAMKLNNQAMKGRFEELSAWTEKQKEERQFFEIQSKEAKERLMALSHENEKLKEELGKLKGKSERSSEDPTDDSRLPRAEAEQEKDQLRTQVVRLQAEKADLLGIVSELQLKLNSSGSSEDSFVEIRMAEGEAEGSVKEIKHSPGPTRTVSTGTALSKYRSRSADGAKNYFEHEELTVSQLLLCLREGNQKVERLEVALKEAKERVSDFEKKTSNRSEIETQTEGSTEKENDEEKGPETVGSEVEALNLQVTSLFKELQEAHTKLSEAELMKKRLQEKCQALERKNSAIPSELNEKQELVYTNKKLELQVESMLSEIKMEQAKTEDEKSKLTVLQMTHNKLLQEHNNALKTIEELTRKESEKVDRAVLKELSEKLELAEKALASKQLQMDEMKQTIAKQEEDLETMTILRAQMEVYCSDFHAERAAREKIHEEKEQLALQLAVLLKENDAFEDGGRQSLMEMQSRHGARTSDSDQQAYLVQRGAEDRDWRQQRNIPIHSCPKCGEVLPDIDTLQIHVMDCII

SEQ ID NO: 136 - DNA, 3528 bp, Homo sapiens
ggcgcgggcagggagcggctggctgtcagctgagccgcgctgggcggggtcgccaggccgcgcatcagccctaggcaccccagtcccggctgccccctccgccaccgccgccgcccgccggcaggttccctggtcagcgtcccatcccggtcgggagttctctccaggcggcacgatgccgaggaaacagtgaccctgagcgaagccaagccgggcggcaggtgtggctttgatagctggtggtgccacttcctggccttggatgagccgtacgcctctgtaaacccaacttcctcacctttgaaacagctgcctggttcagcattaatgaagattagtcagtgacaggcctggtgtgctgagtccgcacatagaacttctgcaatgtcccatcaacctctcagctgcctcactgaaaaggaggacagccccagtgaaagcacaggaaatggacccccccacctggcccacccaaacctggacacgtttaccccggaggagctgctgcagcagatgaaagagctcctgaccgagaaccaccagctgaaagaagccatgaagctaaataatcaagccatgaaagggagatttgaggagctttcggcctggacagagaaacagaaggaagaacgccagttttttgagatacagagcaaagaagcaaaagagcgtctaatggccttgagtcatgagaatgagaaattgaaggaagagcttggaaaactaaaagggaaatcagaaaggtcatctgaggaccccactgatgactccaggcttcccagggccgaagcggagcaggaaaaggaccagctcaggacccaggtggtgaggctacaagcagagaaggcagacctgttgggcatcgtgtctgaactgcagctcaagctgaactccagcggctcctcagaagattcctttgttgaaattaggatggctgaaggagaagcagaagggtcagtaaaagaaatcaagcatagtcctgggcccacgagaacagtctccactggcacggcattgtctaaatataggagcagatctgcagatggggccaagaattacttcgaacatgaggagttaactgtgagccagctcctgctgtgcctaagggaagggaatcagaaggtggagagacttgaagttgcactcaaggaggccaaagaaagagtttcagattttgaaaagaaaacaagtaatcgttctgagattgaaacccagacagaggggagcacagagaaagagaatgatgaagagaaaggcccggagactgttggaagcgaagtggaagcactgaacctccaggtgacatctctgtttaaggagcttcaagaggctcatacaaaactcagcgaagctgagctaatgaagaagagacttcaagaaaagtgtcaggcccttgaaaggaaaaattctgcaattccatcagagttgaatgaaaagcaagagcttgtttatactaacaaaaagttagagctacaagtggaaagcatgctatcagaaatcaaaatggaacaggctaaaacagaggatgaaaagtccaaattaactgtgctacagatgacacacaacaagcttcttcaagaacataataatgcattgaaaacaattgaggaactaacaagaaaagagtcagaaaaagtggacagggcagtgctgaaggaactgagtgaaaaactggaactggcagagaaggctctggcttccaaacagctgcaaatggatgaaatgaagcaaaccattgccaagcaggaagaggacctggaaaccatgaccatcctcagggctcagatggaagtttactgttctgattttcatgctgaaagagcagcgagagagaaaattcatgaggaaaaggagcaactggcattgcagctggcagttctgctgaaagagaatgatgctttcgaagacggaggcaggcagtccttgatggagatgcagagtcgtcatggggcgagaacaagtgactctgaccagcaggcttaccttgttcaaagaggagctgaggacagggactggcggcaacagcggaatattccgattcattcctgccccaagtgtggagaggttctgcctgacatagacacgttacagattcacgtgatggattgcatcatttaagtgttgatgtatcacctccccaaaactgttggtaaatgtcagattttttcctccaagagttgtgcttttgtgttatttgttttcactcaaatattttgcctcattattcttgttttaaaagaaagaaaacaggccgggcacagtggctcatgcctgtaatcccagcactttgggaggtcgaggtgggtggatcacttggggtcagggtttgagaccagcctggccaacatggcggaaccctgtctctaccaaaattacaaaaattagccgagcatggtggcgcatgcctgtagtcgcagctactcgcgaggttgaggcaggagaattgcttgaacccaggaagtggcagttgcagtgagccgagacgacaccactgcactccagcctgggtgacagagggagactctgtctcgaaagaaagaaagaaaaaaaggaaggaaggagaaggaaggaaggagaagaaaaggtacctgttctacgtagaacacctttggtggagttccatcaactcgcaaagtagaatccttacctactactcttctgataataattttaatattttttatgtttggttgatgcgagcagctgcactgctcatgcagttagctagcatgtgacatcatgtgacaaagttcatgtaattagatggaagaaacctcactgattaattttaagaaccttttagggatgcaggaacaatgaagtggccacagtatgtgctgtttttgaagcatttttaaaaacgaattgtagttgtttttcttcatttaaaatggatctgttggaggttatgtgtgtatgttgtagttttattgcagccacaataattttaccaaagttttcacataggcagttagcctttacttaatatcaagacaagtgaaaaaatattggcatcgatgaaaccgataacattggcctcattggatttctttacccattcacagtgtaaagaagttaccttcatgctttcattgtacctgcaggcctgtgggcttgtacagtagataattaatttctaaaaagaacagctgcctattttcttcctaggttaggttatatcttcataatcacaagaattagtgatggcaaaataaaattttgcttatgaatcttttacattgtttatatatgattaatatcatcatatatattttctgtattaagctcatttggcttcatttaagctgtatacttagtcatatatctttcattagttctatggatatgagcagatccctttactggagcccagtatgtgctgtgtgagttagaagtcattcttgctgagaaggtgaataggtagggatttgccttgttttgtaagtctacaatttgccaagagtaaataacactggaccagctgtaaaagtaaacagtgtgtttatgcattgagatactaaagcattt

SEQ ID NO: 137 - protein, 577 aa, Homo sapiens; identical to SEQ ID NO: 135

SEQ ID NO: 138 - DNA, 3582 bp, Homo sapiens
ggcgcgggcagggagcggctggctgtcagctgagccgcgctgggcggggtcgccaggccgcgcatcagccctaggcaccccagtcccggctgccccctccgccaccgccgccgcccgccggcaggttccctggtcagcgtcccatcccggtcgggagttctctccaggcggcacgatgccgaggaaacagtgaccctgagcgaagccaagccgggcggcaggtgtggctttgatagctggtggtgccacttcctggccttggatgagccgtacgcctctgtaaacccaacttcctcacctttgaaacagctgcctggttcagcattaatgaagattagtcagtgacaggcctggtgtgctgagtccgcacatagaagaatcaaaaatgtccaaaatgtaactggagagaaagtgggcaacttttggagaacttctgcaatgtcccatcaacctctcagctgcctcactgaaaaggaggacagccccagtgaaagcacaggaaatggacccccccacctggcccacccaaacctggacacgtttaccccggaggagctgctgcagcagatgaaagagctcctgaccgagaaccaccagctgaaagaagccatgaagctaaataatcaagccatgaaagggagatttgaggagctttcggcctggacagagaaacagaaggaagaacgccagttttttgagatacagagcaaagaagcaaaagagcgtctaatggccttgagtcatgagaatgagaaattgaaggaagagcttggaaaactaaaagggaaatcagaaaggtcatctgaggaccccactgatgactccaggcttcccagggccgaagcggagcaggaaaaggaccagctcaggacccaggtggtgaggctacaagcagagaaggcagacctgttgggcatcgtgtctgaactgcagctcaagctgaactccagcggctcctcagaagattcctttgttgaaattaggatggctgaaggagaagcagaagggtcagtaaaagaaatcaagcatagtcctgggcccacgagaacagtctccactggcacggcattgtctaaatataggagcagatctgcagatggggccaagaattacttcgaacatgaggagttaactgtgagccagctcctgctgtgcctaagggaagggaatcagaaggtggagagacttgaagttgcactcaaggaggccaaagaaagagtttcagattttgaaaagaaaacaagtaatcgttctgagattgaaacccagacagaggggagcacagagaaagagaatgatgaagagaaaggcccggagactgttggaagcgaagtggaagcactgaacctccaggtgacatctctgtttaaggagcttcaagaggctcatacaaaactcagcgaagctgagctaatgaagaagagacttcaagaaaagtgtcaggcccttgaaaggaaaaattctgcaattccatcagagttgaatgaaaagcaagagcttgtttatactaacaaaaagttagagctacaagtggaaagcatgctatcagaaatcaaaatggaacaggctaaaacagaggatgaaaagtccaaattaactgtgctacagatgacacacaacaagcttcttcaagaacataataatgcattgaaaacaattgaggaactaacaagaaaagagtcagaaaaagtggacagggcagtgctgaaggaactgagtgaaaaactggaactggcagagaaggctctggcttccaaacagctgcaaatggatgaaatgaagcaaaccattgccaagcaggaagaggacctggaaaccatgaccatcctcagggctcagatggaagtttactgttctgattttcatgctgaaagagcagcgagagagaaaattcatgaggaaaaggagcaactggcattgcagctggcagttctgctgaaagagaatgatgctttcgaagacggaggcaggcagtccttgatggagatgcagagtcgtcatggggcgagaacaagtgactctgaccagcaggcttaccttgttcaaagaggagctgaggacagggactggcggcaacagcggaatattccgattcattcctgccccaagtgtggagaggttctgcctgacatagacacgttacagattcacgtgatggattgcatcatttaagtgttgatgtatcacctccccaaaactgttggtaaatgtcagattttttcctccaagagttgtgcttttgtgttatttgttttcactcaaatattttgcctcattattcttgttttaaaagaaagaaaacaggccgggcacagtggctcatgcctgtaatcccagcactttgggaggtcgaggtgggtggatcacttggggtcagggtttgagaccagcctggccaacatggcggaaccctgtctctaccaaaattacaaaaattagccgagcatggtggcgcatgcctgtagtcgcagctactcgcgaggttgaggcaggagaattgcttgaacccaggaagtggcagttgcagtgagccgagacgacaccactgcactccagcctgggtgacagagggagactctgtctcgaaagaaagaaagaaaaaaaggaaggaaggagaaggaaggaaggagaagaaaaggtacctgttctacgtagaacacctttggtggagttccatcaactcgcaaagtagaatccttacctactactcttctgataataattttaatattttttatgtttggttgatgcgagcagctgcactgctcatgcagttagctagcatgtgacatcatgtgacaaagttcatgtaattagatggaagaaacctcactgattaattttaagaaccttttagggatgcaggaacaatgaagtggccacagtatgtgctgtttttgaagcatttttaaaaacgaattgtagttgtttttcttcatttaaaatggatctgttggaggttatgtgtgtatgttgtagttttattgcagccacaataattttaccaaagttttcacataggcagttagcctttacttaatatcaagacaagtgaaaaaatattggcatcgatgaaaccgataacattggcctcattggatttctttacccattcacagtgtaaagaagttaccttcatgctttcattgtacctgcaggcctgtgggcttgtacagtagataattaatttctaaaaagaacagctgcctattttcttcctaggttaggttatatcttcataatcacaagaattagtgatggcaaaataaaattttgcttatgaatcttttacattgtttatatatgattaatatcatcatatatattttctgtattaagctcatttggcttcatttaagctgtatacttagtcatatatctttcattagttctatggatatgagcagatccctttactggagcccagtatgtgctgtgtgagttagaagtcattcttgctgagaaggtgaataggtagggatttgccttgttttgtaagtctacaatttgccaagagtaaataacactggaccagctgtaaaagtaaacagtgtgtttatgcattgagatactaaagcattt

SEQ ID NO: 139 - protein, 577 aa, Homo sapiens; identical to SEQ ID NO: 135

SEQ ID NO: 140 - DNA, 3376 bp, Homo sapiens
ggcgcgggcagggagcggctggctgtcagctgagccgcgctgggcggggtcgccaggccgcgcatcagccctaggcaccccagtcccggctgccccctccgccaccgccgccgcccgccggcaggttccctggtcagcgtcccatcccggtcgggagttctctccaggcggcacgatgccgaggaaacagtgaccctgagcgaagccaagccgggcggcaggaacttctgcaatgtcccatcaacctctcagctgcctcactgaaaaggaggacagccccagtgaaagcacaggaaatggacccccccacctggcccacccaaacctggacacgtttaccccggaggagctgctgcagcagatgaaagagctcctgaccgagaaccaccagctgaaagaagccatgaagctaaataatcaagccatgaaagggagatttgaggagctttcggcctggacagagaaacagaaggaagaacgccagttttttgagatacagagcaaagaagcaaaagagcgtctaatggccttgagtcatgagaatgagaaattgaaggaagagcttggaaaactaaaagggaaatcagaaaggtcatctgaggaccccactgatgactccaggcttcccagggccgaagcggagcaggaaaaggaccagctcaggacccaggtggtgaggctacaagcagagaaggcagacctgttgggcatcgtgtctgaactgcagctcaagctgaactccagcggctcctcagaagattcctttgttgaaattaggatggctgaaggagaagcagaagggtcagtaaaagaaatcaagcatagtcctgggcccacgagaacagtctccactggcacggcattgtctaaatataggagcagatctgcagatggggccaagaattacttcgaacatgaggagttaactgtgagccagctcctgctgtgcctaagggaagggaatcagaaggtggagagacttgaagttgcactcaaggaggccaaagaaagagtttcagattttgaaaagaaaacaagtaatcgttctgagattgaaacccagacagaggggagcacagagaaagagaatgatgaagagaaaggcccggagactgttggaagcgaagtggaagcactgaacctccaggtgacatctctgtttaaggagcttcaagaggctcatacaaaactcagcgaagctgagctaatgaagaagagacttcaagaaaagtgtcaggcccttgaaaggaaaaattctgcaattccatcagagttgaatgaaaagcaagagcttgtttatactaacaaaaagttagagctacaagtggaaagcatgctatcagaaatcaaaatggaacaggctaaaacagaggatgaaaagtccaaattaactgtgctacagatgacacacaacaagcttcttcaagaacataataatgcattgaaaacaattgaggaactaacaagaaaagagtcagaaaaagtggacagggcagtgctgaaggaactgagtgaaaaactggaactggcagagaaggctctggcttccaaacagctgcaaatggatgaaatgaagcaaaccattgccaagcaggaagaggacctggaaaccatgaccatcctcagggctcagatggaagtttactgttctgattttcatgctgaaagagcagcgagagagaaaattcatgaggaaaaggagcaactggcattgcagctggcagttctgctgaaagagaatgatgctttcgaagacggaggcaggcagtccttgatggagatgcagagtcgtcatggggcgagaacaagtgactctgaccagcaggcttaccttgttcaaagaggagctgaggacagggactggcggcaacagcggaatattccgattcattcctgccccaagtgtggagaggttctgcctgacatagacacgttacagattcacgtgatggattgcatcatttaagtgttgatgtatcacctccccaaaactgttggtaaatgtcagattttttcctccaagagttgtgcttttgtgttatttgttttcactcaaatattttgcctcattattcttgttttaaaagaaagaaaacaggccgggcacagtggctcatgcctgtaatcccagcactttgggaggtcgaggtgggtggatcacttggggtcagggtttgagaccagcctggccaacatggcggaaccctgtctctaccaaaattacaaaaattagccgagcatggtggcgcatgcctgtagtcgcagctactcgcgaggttgaggcaggagaattgcttgaacccaggaagtggcagttgcagtgagccgagacgacaccactgcactccagcctgggtgacagagggagactctgtctcgaaagaaagaaagaaaaaaaggaaggaaggagaaggaaggaaggagaagaaaaggtacctgttctacgtagaacacctttggtggagttccatcaactcgcaaagtagaatccttacctactactcttctgataataattttaatattttttatgtttggttgatgcgagcagctgcactgctcatgcagttagctagcatgtgacatcatgtgacaaagttcatgtaattagatggaagaaacctcactgattaattttaagaaccttttagggatgcaggaacaatgaagtggccacagtatgtgctgtttttgaagcatttttaaaaacgaattgtagttgtttttcttcatttaaaatggatctgttggaggttatgtgtgtatgttgtagttttattgcagccacaataattttaccaaagttttcacataggcagttagcctttacttaatatcaagacaagtgaaaaaatattggcatcgatgaaaccgataacattggcctcattggatttctttacccattcacagtgtaaagaagttaccttcatgctttcattgtacctgcaggcctgtgggcttgtacagtagataattaatttctaaaaagaacagctgcctattttcttcctaggttaggttatatcttcataatcacaagaattagtgatggcaaaataaaattttgcttatgaatcttttacattgtttatatatgattaatatcatcatatatattttctgtattaagctcatttggcttcatttaagctgtatacttagtcatatatctttcattagttctatggatatgagcagatccctttactggagcccagtatgtgctgtgtgagttagaagtcattcttgctgagaaggtgaataggtagggatttgccttgttttgtaagtctacaatttgccaagagtaaataacactggaccagctgtaaaagtaaacagtgtgtttatgcattgagatactaaagcattt

SEQ ID NO: 141 - protein, 577 aa, Homo sapiens; identical to SEQ ID NO: 135

SEQ ID NO: 142 - DNA, 1549 bp, Homo sapiens
ccggtgtctaggtcacccctggagcgctcaccccaccggcaccagtgcccaagcccgcccctgcaaaggcaggcaaggccaggcgggtgctgcctgggacccagtgactcagcacccctgcccggatcaactggacttttgccccctgctccgccagcctcctgcttggatctctcctgggtctccctgctgcgcctgtccaggatgcagggagctcgggctcccagggaccagggccagtcccccggcaggatgagcgctctaggccggtcctcggtcatcttgcttacctacgtgctggccgccacagaacttacctgcctcttcatgcagttctccatcgtgccatacctgtctcggaaactgggcctggattccattgccttcggctacctgcaaaccaccttcggggtgctgcagctgctgggcgggccggtgtttggcaggttcgcagaccagcgcggggcgcgggcggcgctcacgctctccttcctggctgccttggcgctctacctgctcctggcggccgcctccagcccggccctgcccggggtctacctgctcttcgcctcgcgcctgcccggagcgctcatgcacacgctgccagccgcccagatggtcatcacggacctgtcggcacccgaggagcggcccgcggccctgggccggctgggcctctgcttcggcgtcggagtcatcctcggctccctgctgggcgggaccctggtctccgcgtacgggattcagtgcccggccatcctggctgccctggccaccctcctgggagctgtcctcagcttcacctgcatccccgccagcaccaaaggggccaaaactgacgcccaggctccactgccaggcggcccccgggccagtgtgttcgacctgaaggccatcgcctccctgctgcggctgccagacgtcccgaggatcttcctggtgaaggtggcctccaactgccccacagggctcttcatggtcatgttctccatcatctccatggacttcttccagctggaggccgcccaagctggctacctcatgtccttcttcgggctcctccagatggtgacccagggcctggtcatcgggcagctgagcagccacttctcggaggaggtgctgctccgggccagcgtgctggtcttcatcgtggtgggcctggccatggcctggatgtccagcgtcttccacttctgcctcctggtgcccggcctggtgttcagcctctgcaccctcaacgtggtcaccgacagcatgctgatcaaggctgtctccacctcggacacagggaccatgctgggcctctgcgcctctgtacaaccactgctccgaactctgggacccacggtcggcggcctcctgtaccgcagctttggcgtccccgtcttcggccacgtgcaggttgctatcaatacccttgtcctcctggtcctctggaggaaacctatgccccagaggaaggacaaagtccggtgaccgctgcccagacacagactggcaataaactcctactaaatccctccgaaaaaaaaaaaaaaaaaaaaaa

SEQ ID NO: 143 - protein, 424 aa, Homo sapiens
MQGARAPRDQGQSPGRMSALGRSSVILLTYVLAATELTCLFMQFSIVPYLSRKLGLDSIAFGYLQTTFGVLQLLGGPVFGRFADQRGARAALTLSFLAALALYLLLAAASSPALPGVYLLFASRLPGALMHTLPAAQMVITDLSAPEERPAALGRLGLCFGVGVILGSLLGGTLVSAYGIQCPAILAALATLLGAVLSFTCIPASTKGAKTDAQAPLPGGPRASVFDLKAIASLLRLPDVPRIFLVKVASNCPTGLFMVMFSIISMDFFQLEAAQAGYLMSFFGLLQMVTQGLVIGQLSSHFSEEVLLRASVLVFIVVGLAMAWMSSVFHFCLLVPGLVFSLCTLNVVTDSMLIKAVSTSDTGTMLGLCASVQPLLRTLGPTVGGLLYRSFGVPVFGHVQVAINTLVLLVLWRKPMPQRKDKVR

SEQ ID NO: 144 - DNA, 2583 bp, Homo sapiens
ggaggcaggcggtgccgcggcgccgggacccgactcatccggtgcttgcgtgtggtggtgagcgcagcgccgaggatgaggaggtgcaacagcggctccgggccgccgccgtcgctgctgctgctgctgctgtggctgctcgcggttcccggcgctaacgcggccccgcggtcggcgctctattcgccttccgacccgctgacgctgctgcaggcggacacggtgcgcggcgcggtgctgggctcccgcagcgcctgggccgtggagttcttcgcctcctggtgcggccactgcatcgccttcgccccgacgtggaaggcgctggccgaagacgtcaaagcctggaggccggccctgtatctcgccgccctggactgtgctgaggagaccaacagtgcagtctgcagagacttcaacatccctggcttcccgactgtgaggttcttcaaggcctttaccaagaacggctcgggagcagtatttccagtggctggtgctgacgtgcagacactgcgggagaggctcattgacgccctggagtcccatcatgacacgtggcccccagcctgtcccccactggagcctgccaagctggaggagattgatggattctttgcgagaaataacgaagagtacctggctctgatctttgaaaagggaggctcctacctgggtagagaggtggctctggacctgtcccagcacaaaggcgtggcggtgcgcagggtgctgaacacagaggccaatgtggtgagaaagtttggtgtcaccgacttcccctcttgctacctgctgttccggaatggctctgtctcccgagtccccgtgctcatggaatccaggtccttctataccgcttacctgcagagactctctgggctcaccagggaggctgcccagaccacagttgcaccaaccactgctaacaagatagctcccactgtttggaaattggcagatcgctccaagatctacatggctgacctggaatctgcactgcactacatcctgcggatagaagtgggcaggttcccggtcctggaagggcagcgcctggtggccctgaaaaagtttgtggcagtgctggccaagtatttccctggccggcccttagtccagaacttcctgcactccgtgaatgaatggctcaagaggcagaagagaaataaaattccctacagtttctttaaaactgccctggacgacaggaaagagggtgccgttcttgccaagaaggtgaactggattggctgccaggggagtgagccgcatttccggggctttccctgctccctgtgggtcctcttccacttcttgactgtgcaggcagctcggcaaaatgtagaccactcacaggaagcagccaaggccaaggaggtcctcccagccatccgaggctacgtgcactacttcttcggctgccgagactgcgctagccacttcgagcagatggctgctgcctccatgcaccgggtggggagtcccaacgccgctgtcctctggctctggtctagccacaacagggtcaatgctcgccttgcaggtgcccccagcgaggacccccagttccccaaggtgcagtggccaccccgtgaactttgttctgcctgccacaatgaacgcctggatgtgcccgtgtgggacgtggaagccaccctcaacttcctcaaggcccacttctccccaagcaacatcatcctggacttccctgcagctgggtcagctgcccggagggatgtgcagaatgtggcagccgccccagagctggcgatgggagccctggagctggaaagccggaattcaactctggaccctgggaagcctgagatgatgaagtcccccacaaacaccaccccacatgtgccggctgagggacctgagcttatttgaagtcctgcctcattctcactggagcctcagtctctcctgcttggtcttggccctcaactggggcaagtgaagccagaggagggtcccccagctgggtgggctggaatggaactcctcactagctgctggggctccgcccaccctgctcccttccggacaatgaagaagcctttgcaccctgggaggaaggaccaccccgggccctctatgcctggccagcctccagctcctcagacctcctgggtggggtttggcttcagggtggggtttggaagcttctggaagtcgtgctggtctcccaggtgaggcaagccatggttgctgggctgtagggtgagtggcttgcttggtgggacctgacgagttggtggcatgggaaggatgtgggtctctagtgccttgccctggcttagctgcaggagaagatggctgctttcacttccccccattgagctctgctccctctgagcctggtcttttgtccttttttattttggtctccaagatgaatgctcatctttggagggtgccaggtagaagctagggaggggagtgtcttctctctccaggtttcaccttccagtgtgcagaagttagaagggtctggcgggggcagtgccttacacatgcttgattcccacgctaccccctgccttgggaggtgtgtggaataaattatttttgttaaggcaa

SEQ ID NO: 145 - protein, 604 aa, Homo sapiens
MRRCNSGSGPPPSLLLLLLWLLAVPGANAAPRSALYSPSDPLTLLQADTVRGAVLGSRSAWAVEFFASWCGHCIAFAPTWKALAEDVKAWRPALYLAALDCAEETNSAVCRDFNIPGFPTVRFFKAFTKNGSGAVFPVAGADVQTLRERLIDALESHHDTWPPACPPLEPAKLEEIDGFFARNNEEYLALIFEKGGSYLGREVALDLSQHKGVAVRRVLNTEANVVRKFGVTDFPSCYLLFRNGSVSRVPVLMESRSFYTAYLQRLSGLTREAAQTTVAPTTANKIAPTVWKLADRSKIYMADLESALHYILRIEVGRFPVLEGQRLVALKKFVAVLAKYFPGRPLVQNFLHSVNEWLKRQKRNKIPYSFFKTALDDRKEGAVLAKKVNWIGCQGSEPHFRGFPCSLWVLFHFLTVQAARQNVDHSQEAAKAKEVLPAIRGYVHYFFGCRDCASHFEQMAAASMHRVGSPNAAVLWLWSSHNRVNARLAGAPSEDPQFPKVQWPPRELCSACHNERLDVPVWDVEATLNFLKAHFSPSNIILDFPAAGSAARRDVQNVAAAPELAMGALELESRNSTLDPGKPEMMKSPTNTTPHVPAEGPELI

SEQ ID NO: 146 - DNA, 3316 bp, Homo sapiens
ggaggcaggcggtgccgcggcgccgggacccgactcatccggtgcttgcgtgtggtggtgagcgcagcgccgaggatgaggaggtgcaacagcggctccgggccgccgccgtcgctgctgctgctgctgctgtggctgctcgcggttcccggcgctaacgcggccccgcggtcggcgctctattcgccttccgacccgctgacgctgctgcaggcggacacggtgcgcggcgcggtgctgggctcccgcagcgcctgggccgtggagttcttcgcctcctggtgcggccactgcatcgccttcgccccgacgtggaaggcgctggccgaagacgtcaaagcctggaggccggccctgtatctcgccgccctggactgtgctgaggagaccaacagtgcagtctgcagagacttcaacatccctggcttcccgactgtgaggttcttcaaggcctttaccaagaacggctcgggagcagtatttccagtggctggtgctgacgtgcagacactgcgggagaggctcattgacgccctggagtcccatcatgacacgtggcccccagcctgtcccccactggagcctgccaagctggaggagattgatggattctttgcgagaaataacgaagagtacctggctctgatctttgaaaagggaggctcctacctgggtagagaggtggctctggacctgtcccagcacaaaggcgtggcggtgcgcagggtgctgaacacagaggccaatgtggtgagaaagtttggtgtcaccgacttcccctcttgctacctgctgttccggaatggctctgtctcccgagtccccgtgctcatggaatccaggtccttctataccgcttacctgcagagactctctgggctcaccagggaggctgcccagaccacagttgcaccaaccactgctaacaagatagctcccactgtttggaaattggcagatcgctccaagatctacatggctgacctggaatctgcactgcactacatcctgcggatagaagtgggcaggttcccggtcctggaagggcagcgcctggtggccctgaaaaagtttgtggcagtgctggccaagtatttccctggccggcccttagtccagaacttcctgcactccgtgaatgaatggctcaagaggcagaagagaaataaaattccctacagtttctttaaaactgccctggacgacaggaaagagggtgccgttcttgccaagaaggtgaactggattggctgccaggggagtgagccgcatttccggggctttccctgctccctgtgggtcctcttccacttcttgactgtgcaggcagctcggcaaaatgtagaccactcacaggaagcagccaaggccaaggaggtcctcccagccatccgaggctacgtgcactacttcttcggctgccgagactgcgctagccacttcgagcagatggctgctgcctccatgcaccgggtggggagtcccaacgccgctgtcctctggctctggtctagccacaacagggtcaatgctcgccttgcaggtgcccccagcgaggacccccagttccccaaggtgcagtggccaccccgtgaactttgttctgcctgccacaatgaacgcctggatgtgcccgtgtgggacgtggaagccaccctcaacttcctcaaggcccacttctccccaagcaacatcatcctggacttccctgcagctgggtcagctgcccggagggatgtgcagaatgtggcagccgccccagagctggcgatgggagccctggagctggaaagccggaattcaactctggaccctgggaagcctgagatgatgaagtcccccacaaacaccaccccacatgtgccggctgagggacctgaggcaagtcgacccccgaagctgcaccctggcctcagagctgcaccaggccaggagcctcctgagcacatggcagagcttcagaggaatgagcaggagcagccgcttgggcagtggcacttgagcaagcgagacacaggggctgcattgctggctgagtccagggctgagaagaaccgcctctggggccctttggaggtcaggcgcgtgggccgcagctccaagcagctggtcgacatccctgagggccagctggaggcccgagctggacggggccgaggccagtggctgcaggtgctgggagggggcttctcttacctggacatcagcctctgtgtggggctctattccctgtccttcatgggcctgctggccatgtacacctacttccaggccaagataagggccctgaagggccatgctggccaccctgcagcctgaaccacctggggaggaggcgggagagggagctgccatctctaggcacctcaagccccctgaccccattccctcccctcccaccccttgctccttgtctggcctagaagtgtgggaaattcaggaaaacgagttgctccagtgaagcttcttggggttgctaggacagagagctcctttgacacaaaagacaggagcagggtccaggttcccctgctgtgcagggagggcagccccgggcagtgggcatagggcagctcagtccctggcctcttagcaccacattcctgtttttcagcttatttgaagtcctgcctcattctcactggagcctcagtctctcctgcttggtcttggccctcaactggggcaagtgaagccagaggagggtcccccagctgggtgggctggaatggaactcctcactagctgctggggctccgcccaccctgctcccttccggacaatgaagaagcctttgcaccctgggaggaaggaccaccccgggccctctatgcctggccagcctccagctcctcagacctcctgggtggggtttggcttcagggtggggtttggaagcttctggaagtcgtgctggtctcccaggtgaggcaagccatggttgctgggctgtagggtgagtggcttgcttggtgggacctgacgagttggtggcatgggaaggatgtgggtctctagtgccttgccctggcttagctgcaggagaagatggctgctttcacttccccccattgagctctgctccctctgagcctggtcttttgtccttttttattttggtctccaagatgaatgctcatctttggagggtgccaggtagaagctagggaggggagtgtcttctctctccaggtttcaccttccagtgtgcagaagttagaagggtctggcgggggcagtgccttacacatgcttgattcccacgctaccccctgccttgggaggtgtgtggaataaattatttttgttaaggcaa

SEQ ID NO: 147 - protein, 747 aa, Homo sapiens
MRRCNSGSGPPPSLLLLLLWLLAVPGANAAPRSALYSPSDPLTLLQADTVRGAVLGSRSAWAVEFFASWCGHCIAFAPTWKALAEDVKAWRPALYLAALDCAEETNSAVCRDFNIPGFPTVRFFKAFTKNGSGAVFPVAGADVQTLRERLIDALESHHDTWPPACPPLEPAKLEEIDGFFARNNEEYLALIFEKGGSYLGREVALDLSQHKGVAVRRVLNTEANVVRKFGVTDFPSCYLLFRNGSVSRVPVLMESRSFYTAYLQRLSGLTREAAQTTVAPTTANKIAPTVWKLADRSKIYMADLESALHYILRIEVGRFPVLEGQRLVALKKFVAVLAKYFPGRPLVQNFLHSVNEWLKRQKRNKIPYSFFKTALDDRKEGAVLAKKVNWIGCQGSEPHFRGFPCSLWVLFHFLTVQAARQNVDHSQEAAKAKEVLPAIRGYVHYFFGCRDCASHFEQMAAASMHRVGSPNAAVLWLWSSHNRVNARLAGAPSEDPQFPKVQWPPRELCSACHNERLDVPVWDVEATLNFLKAHFSPSNIILDFPAAGSAARRDVQNVAAAPELAMGALELESRNSTLDPGKPEMMKSPTNTTPHVPAEGPEASRPPKLHPGLRAAPGQEPPEHMAELQRNEQEQPLGQWHLSKRDTGAALLAESRAEKNRLWGPLEVRRVGRSSKQLVDIPEGQLEARAGRGRGQWLQVLGGGFSYLDISLCVGLYSLSFMGLLAMYTYFQAKIRALKGHAGHPAA

SEQ ID NO: 148 - DNA, 1363 bp, Homo sapiens
agcgtcggactaccgttggtttccgcaacttcctggattatcctcgccaaggactttgcaatatatttttccgccttttctggaaggatttcgctgcttcccgaaggtcttggacgagcgctctagctctgtgggaaggttttgggctctctggctcggattttgcaatttctccctggggactgccgtggagccgcatccactgtggattataattgcaacatgacgctggaagagctcgtggcgtgcgacaacgcggcgcagaagatgcagacggtgaccgccgcggtggaggagcttttggtggccgctcagcgccaggatcgcctcacagtgggggtgtacgagtcggccaagttgatgaatgtggacccagacagcgtggtcctctgcctcttggccattgacgaggaggaggaggatgacatcgccctgcaaatccacttcacgctcatccagtccttctgctgtgacaacgacatcaacatcgtgcgggtgtcgggcatgcagcgcctggcgcagctcctgggagagccggccgagacccagggcaccaccgaggcccgagacctgcattgtctcctggtcacgaaccctcacacggacgcctggaagagccacggcttggtggaggtggccagctactgcgaagaaagccggggcaacaaccagtgggtcccctacatctctcttcaggaacgctgaggcccttcccagcagcagaatctgttgagttgctgccacaaacaaaaaatacaataaatatttgaaccccctcccccccagcacaacccccccaaaacaacccaacccacgaggaccatcgggggcagagtcgttggagactgaagaggaagaggaggaggagaaggggagtgagcggccgcccccagggcggagatccaggagctggcggccgccgatccgatggagaaggggggacccaggccagcaggagacaggacccccgaagctgaggccttgggatggagcagaagccggagtggcggggcacgctgccgccttccccatcacggagggtccagactgtccactcgggggtggagtgagactgactgcaagccccaccctccttgagactggagctggcgtctgcatacgagagacttggttgaacttggttggtccttgtctgcaccctcgacaagaccacactttgggacttgggagctggggctgaagttgctctgtacccatgaactcccagtttgcgaattatagagacaatctattttgttacttgcacttgttattcgaaccactgagagcgagatgggaagcatagatatctatatttttatttctactatgagggccttgtaataaatttctaaagcctctg

SEQ ID NO: 149 - protein, 160 aa, Homo sapiens
MTLEELVACDNAAQKMQTVTAAVEELLVAAQRQDRLTVGVYESAKLMNVDPDSVVLCLLAIDEEEEDDIALQIHFTLIQSFCCDNDINIVRVSGMQRLAQLLGEPAETQGTTEARDLHCLLVTNPHTDAWKSHGLVEVASYCEESRGNNQWVPYISLQER

SEQ ID NO: 150 - DNA, 2750 bp, Homo sapiens
attgtttcctactccattttctctggggcaatagcagaataggagcaagccagcactagtcagctaactaagtgactcaaccaaggccttttttccttgttatctttgcagatacttcattttcttagcgtttctggagattacaacatcctgcggttccgtttctgggaactttactgatttatctcccccctcacacaaataagcattgattcctgcatttctgaagatctcaagatctggactactgttgaaaaaatttccagtgaggctcacttatgtctgtaaagatgggaaaaaaatacaagaacattgttctactaaaaggattagaggtcatcaatgattatcattttagaatggttaagtccttactgagcaacgatttaaaacttaatttaaaaatgagagaagagtatgacaaaattcagattgctgacttgatggaagaaaagttccgaggtgatgctggtttgggcaaactaataaaaattttcgaagatataccaacgcttgaagacctggctgaaactcttaaaaaagaaaagttaaaagtaaaaggaccagccctatcaagaaagaggaagaaggaagtggatgctacttcacctgcaccctccacaagcagcactgtcaaaactgaaggagcagaggcaactcctggagctcagaaaagaaaaaaatcaaccaaagaaaaggctggacccaaagggagtaaggtgtccgaggaacagactcagcctccctctcctgcaggagccggcatgtccacagccatgggccgttccccatctcccaagacctcattgtcagctccacccaacagttcttcaactgagaacccgaaaacagtggccaaatgtcaggtaactcccagaagaaatgttctccaaaaacgcccagtgatagtgaaggtactgagtacaacaaagccatttgaatatgagaccccagaaatggagaaaaaaataatgtttcatgctacagtggctacacagacacagttcttccatgtgaaggttttaaacaccagcttgaaggagaaattcaatggaaagaaaatcatcatcatatcagattatttggaatatgatagtctcctagaggtcaatgaagaatctactgtatctgaagctggtcctaaccaaacgtttgaggttccaaataaaatcatcaacagagcaaaggaaactctgaagattgatattcttcacaaacaagcttcaggaaatattgtatatggggtatttatgctacataagaaaacagtaaatcagaagaccacaatctacgaaattcaggatgatagaggaaaaatggatgtagtggggacaggacaatgtcacaatatcccctgtgaagaaggagataagctccaacttttctgctttcgacttagaaaaaagaaccagatgtcaaaactgatttcagaaatgcatagttttatccagataaagaaaaaaacaaacccgagaaacaatgaccccaagagcatgaagctaccccaggaacagcgtcagcttccatatccttcagaggccagcacaaccttccctgagagccatcttcggactcctcagatgccaccaacaactccatccagcagtttcttcaccaagaaaagtgaagacacaatctccaaaatgaatgacttcatgaggatgcagatactgaaggaagggagtcattttccaggaccgttcatgaccagcataggcccagctgagagccatccccacactcctcagatgcctccatcaacaccaagcagcagtttcttaaccacgttgaaaccaagactgaagactgaacctgaagaagtttccatagaagacagtgcccagagtgacctcaaagaagtgatggtgctgaacgcaacagaatcatttgtatatgagcccaaagagcagaagaaaatgtttcatgccacagtggcaactgagaatgaagtcttccgagtgaaggtttttaatattgacctaaaggagaagttcaccccaaagaagatcattgccatagcaaattatgtttgccgcaatgggttcctggaggtatatcctttcacacttgtggctgatgtgaatgctgaccgaaacatggagatcccaaaaggattgattagaagtgccagcgtaactcctaaaatcaatcagctttgctcacaaactaaaggaagttttgtgaatggggtgtttgaggtacataagaaaaatgtaaggggtgaattcacttattatgaaatacaagataatacagggaagatggaagtggtggtgcatggacgactgaccacaatcaactgtgaggaaggagataaactgaaactcacctgctttgaattggcaccgaaaagtgggaataccggggagttgagatctgtaattcatagtcacatcaaggtcatcaagaccaggaaaaacaagaaagacatactcaatcctgattcaagtatggaaacttcaccagactttttcttctaaaatctggatgtcattgacgataatgtttatggagataaggtctaagtgcctaaaaaaatgtacatatacctggttgaaatacaacactatacatacacaccaccatatatactagctgttaatcctatggaatggggtattgggagtgcttttttaatttttcatagtttttttttaataaaatggcatattttgcatctacaacttctataatttgaaaaaataaataaacattatcttttttgtgaaaggaaaaaaaaaaaaaaaaaa

SEQ ID NO: 151 - protein, 729 aa, Homo sapiens
MGKKYKNIVLLKGLEVINDYHFRMVKSLLSNDLKLNLKMREEYDKIQIADLMEEKFRGDAGLGKLIKIFEDIPTLEDLAETLKKEKLKVKGPALSRKRKKEVDATSPAPSTSSTVKTEGAEATPGAQKRKKSTKEKAGPKGSKVSEEQTQPPSPAGAGMSTAMGRSPSPKTSLSAPPNSSSTENPKTVAKCQVTPRRNVLQKRPVIVKVLSTTKPFEYETPEMEKKIMFHATVATQTQFFHVKVLNTSLKEKFNGKKIIIISDYLEYDSLLEVNEESTVSEAGPNQTFEVPNKIINRAKETLKIDILHKQASGNIVYGVFMLHKKTVNQKTTIYEIQDDRGKMDVVGTGQCHNIPCEEGDKLQLFCFRLRKKNQMSKLISEMHSFIQIKKKTNPRNNDPKSMKLPQEQRQLPYPSEASTTFPESHLRTPQMPPTTPSSSFFTKKSEDTISKMNDFMRMQILKEGSHFPGPFMTSIGPAESHPHTPQMPPSTPSSSFLTTLKPRLKTEPEEVSIEDSAQSDLKEVMVLNATESFVYEPKEQKKMFHATVATENEVFRVKVFNIDLKEKFTPKKIIAIANYVCRNGFLEVYPFTLVADVNADRNMEIPKGLIRSASVTPKINQLCSQTKGSFVNGVFEVHKKNVRGEFTYYEIQDNTGKMEVVVHGRLTTINCEEGDKLKLTCFELAPKSGNTGELRSVIHSHIKVIKTRKNKKDILNPDSSMETSPDFFF

SEQ ID NO: 152 - DNA, 2719 bp, Homo sapiens
acttaaggtcggcgacccgaggccgcggctgccgactgggtcccctgccgctgtcgccaccatggctccgcaccgccccgcgcccgcgctgctttgcgcgctgtccctggcgctgtgcgcgctgtcgctgcccgtccgcgcggccactgcgtcgcggggggcgtcccaggcgggggcgccccaggggcgggtgcccgaggcgcggcccaacagcatggtggtggaacaccccgagttcctcaaggcagggaaggagcctggcctgcagatctggcgtgtggagaagttcgatctggtgcccgtgcccaccaacctttatggagacttcttcacgggcgacgcctacgtcatcctgaagacagtgcagctgaggaacggaaatctgcagtatgacctccactactggctgggcaatgagtgcagccaggatgagagcggggcggccgccatctttaccgtgcagctggatgactacctgaacggccgggccgtgcagcaccgtgaggtccagggcttcgagtcggccaccttcctaggctacttcaagtctggcctgaagtacaagaaaggaggtgtggcatcaggattcaagcacgtggtacccaacgaggtggtggtgcagagactcttccaggtcaaagggcggcgtgtggtccgtgccaccgaggtacctgtgtcctgggagagcttcaacaatggcgactgcttcatcctggacctgggcaacaacatccaccagtggtgtggttccaacagcaatcggtatgaaagactgaaggccacacaggtgtccaagggcatccgggacaacgagcggagtggccgggcccgagtgcacgtgtctgaggagggcactgagcccgaggcgatgctccaggtgctgggccccaagccggctctgcctgcaggtaccgaggacaccgccaaggaggatgcggccaaccgcaagctggccaagctctacaaggtctccaatggtgcagggaccatgtccgtctccctcgtggctgatgagaaccccttcgcccagggggccctgaagtcagaggactgcttcatcctggaccacggcaaagatgggaaaatctttgtctggaaaggcaagcaggcaaacacggaggagaggaaggctgccctcaaaacagcctctgacttcatcaccaagatggactaccccaagcagactcaggtctcggtccttcctgagggcggtgagaccccactgttcaagcagttcttcaagaactggcgggacccagaccagacagatggcctgggcttgtcctacctttccagccatatcgccaacgtggagcgggtgcccttcgacgccgccaccctgcacacctccactgccatggccgcccagcacggcatggatgacgatggcacaggccagaaacagatctggagaatcgaaggttccaacaaggtgcccgtggaccctgccacatatggacagttctatggaggcgacagctacatcattctgtacaactaccgccatggtggccgccaggggcagataatctataactggcagggtgcccagtctacccaggatgaggtcgctgcatctgccatcctgactgctcagctggatgaggagctgggaggtacccctgtccagagccgtgtggtccaaggcaaggagcccgcccacctcatgagcctgtttggtgggaagcccatgatcatctacaagggcggcacctcccgcgagggcgggcagacagcccctgccagcacccgcctcttccaggtccgcgccaacagcgctggagccacccgggctgttgaggtattgcctaaggctggtgcactgaactccaacgatgcctttgttctgaaaaccccctcagccgcctacctgtgggtgggtacaggagccagcgaggcagagaagacgggggcccaggagctgctcagggtgctgcgggcccaacctgtgcaggtggcagaaggcagcgagccagatggcttctgggaggccctgggcgggaaggctgcctaccgcacatccccacggctgaaggacaagaagatggatgcccatcctcctcgcctctttgcctgctccaacaagattggacgttttgtgatcgaagaggttcctggtgagctcatgcaggaagacctggcaacggatgacgtcatgcttctggacacctgggaccaggtctttgtctgggttggaaaggattctcaagaagaagaaaagacagaagccttgacttctgctaagcggtacatcgagacggacccagccaatcgggatcggcggacgcccatcaccgtggtgaagcaaggctttgagcctccctcctttgtgggctggttccttggctgggatgatgattactggtctgtggaccccttggacagggccatggctgagctggctgcctgaggaggggcagggcccacccatgtcaccggtcagtgccttttggaactgtccttccctcaaagaggccttagagcgagcagagcagctctgctatgagtgtgtgtgtgtgtgtgtgttgtttcttttttttttttttacagtatccaaaaatagccctgcaaaaattcagagtccttgcaaaattgtctaaaatgtcagtgtttgggaaattaaatccaataaaaacattttgaagtgtgaaaaaaaaaaaaaaaaaaaaaaaaaaaaaaaaaaaaaaaaaaaaaaaaaaaaaaaaaaaaaaaaaaaaaa

SEQ ID NO: 153 - protein, 782 aa, Homo sapiens
MAPHRPAPALLCALSLALCALSLPVRAATASRGASQAGAPQGRVPEARPNSMVVEHPEFLKAGKEPGLQIWRVEKFDLVPVPTNLYGDFFTGDAYVILKTVQLRNGNLQYDLHYWLGNECSQDESGAAAIFTVQLDDYLNGRAVQHREVQGFESATFLGYFKSGLKYKKGGVASGFKHVVPNEVVVQRLFQVKGRRVVRATEVPVSWESFNNGDCFILDLGNNIHQWCGSNSNRYERLKATQVSKGIRDNERSGRARVHVSEEGTEPEAMLQVLGPKPALPAGTEDTAKEDAANRKLAKLYKVSNGAGTMSVSLVADENPFAQGALKSEDCFILDHGKDGKIFVWKGKQANTEERKAALKTASDFITKMDYPKQTQVSVLPEGGETPLFKQFFKNWRDPDQTDGLGLSYLSSHIANVERVPFDAATLHTSTAMAAQHGMDDDGTGQKQIWRIEGSNKVPVDPATYGQFYGGDSYIILYNYRHGGRQGQIIYNWQGAQSTQDEVAASAILTAQLDEELGGTPVQSRVVQGKEPAHLMSLFGGKPMIIYKGGTSREGGQTAPASTRLFQVRANSAGATRAVEVLPKAGALNSNDAFVLKTPSAAYLWVGTGASEAEKTGAQELLRVLRAQPVQVAEGSEPDGFWEALGGKAAYRTSPRLKDKKMDAHPPRLFACSNKIGRFVIEEVPGELMQEDLATDDVMLLDTWDQVFVWVGKDSQEEEKTEALTSAKRYIETDPANRDRRTPITVVKQGFEPPSFVGWFLGWDDDYWSVDPLDRAMAELAA

SEQ ID NO: 154 - DNA, 2685 bp, Homo sapiens
tcccgcccgcgccctgcccaccccggccgcgcgcaccacaacgcccccgccccgccgcccggaaccagctgagcgcagctggacccagcagccgctgtctccagtgccgcagcagcaggtagtgctcatagctctctttgtccagtgcttcggccttggtcccagcgccttcccacggagcagcactcttcaccctgcacagccttgttagcccaacagcatggtggtggaacaccccgagttcctcaaggcagggaaggagcctggcctgcagatctggcgtgtggagaagttcgatctggtgcccgtgcccaccaacctttatggagacttcttcacgggcgacgcctacgtcatcctgaagacagtgcagctgaggaacggaaatctgcagtatgacctccactactggctgggcaatgagtgcagccaggatgagagcggggcggccgccatctttaccgtgcagctggatgactacctgaacggccgggccgtgcagcaccgtgaggtccagggcttcgagtcggccaccttcctaggctacttcaagtctggcctgaagtacaagaaaggaggtgtggcatcaggattcaagcacgtggtacccaacgaggtggtggtgcagagactcttccaggtcaaagggcggcgtgtggtccgtgccaccgaggtacctgtgtcctgggagagcttcaacaatggcgactgcttcatcctggacctgggcaacaacatccaccagtggtgtggttccaacagcaatcggtatgaaagactgaaggccacacaggtgtccaagggcatccgggacaacgagcggagtggccgggcccgagtgcacgtgtctgaggagggcactgagcccgaggcgatgctccaggtgctgggccccaagccggctctgcctgcaggtaccgaggacaccgccaaggaggatgcggccaaccgcaagctggccaagctctacaaggtctccaatggtgcagggaccatgtccgtctccctcgtggctgatgagaaccccttcgcccagggggccctgaagtcagaggactgcttcatcctggaccacggcaaagatgggaaaatctttgtctggaaaggcaagcaggcaaacacggaggagaggaaggctgccctcaaaacagcctctgacttcatcaccaagatggactaccccaagcagactcaggtctcggtccttcctgagggcggtgagaccccactgttcaagcagttcttcaagaactggcgggacccagaccagacagatggcctgggcttgtcctacctttccagccatatcgccaacgtggagcgggtgcccttcgacgccgccaccctgcacacctccactgccatggccgcccagcacggcatggatgacgatggcacaggccagaaacagatctggagaatcgaaggttccaacaaggtgcccgtggaccctgccacatatggacagttctatggaggcgacagctacatcattctgtacaactaccgccatggtggccgccaggggcagataatctataactggcagggtgcccagtctacccaggatgaggtcgctgcatctgccatcctgactgctcagctggatgaggagctgggaggtacccctgtccagagccgtgtggtccaaggcaaggagcccgcccacctcatgagcctgtttggtgggaagcccatgatcatctacaagggcggcacctcccgcgagggcgggcagacagcccctgccagcacccgcctcttccaggtccgcgccaacagcgctggagccacccgggctgttgaggtattgcctaaggctggtgcactgaactccaacgatgcctttgttctgaaaaccccctcagccgcctacctgtgggtgggtacaggagccagcgaggcagagaagacgggggcccaggagctgctcagggtgctgcgggcccaacctgtgcaggtggcagaaggcagcgagccagatggcttctgggaggccctgggcgggaaggctgcctaccgcacatccccacggctgaaggacaagaagatggatgcccatcctcctcgcctctttgcctgctccaacaagattggacgttttgtgatcgaagaggttcctggtgagctcatgcaggaagacctggcaacggatgacgtcatgcttctggacacctgggaccaggtctttgtctgggttggaaaggattctcaagaagaagaaaagacagaagccttgacttctgctaagcggtacatcgagacggacccagccaatcgggatcggcggacgcccatcaccgtggtgaagcaaggctttgagcctccctcctttgtgggctggttccttggctgggatgatgattactggtctgtggaccccttggacagggccatggctgagctggctgcctgaggaggggcagggcccacccatgtcaccggtcagtgccttttggaactgtccttccctcaaagaggccttagagcgagcagagcagctctgctatgagtgtgtgtgtgtgtgtgtgttgtttcttttttttttttttacagtatccaaaaatagccctgcaaaaattcagagtccttgcaaaattgtctaaaatgtcagtgtttgggaaattaaatccaataaaaacattttgaagtgtgaaaaaaaaaaaaaaaaaaaaaaaaaaaaaa

SEQ ID NO: 155 - protein, 731 aa, Homo sapiens
MVVEHPEFLKAGKEPGLQIWRVEKFDLVPVPTNLYGDFFTGDAYVILKTVQLRNGNLQYDLHYWLGNECSQDESGAAAIFTVQLDDYLNGRAVQHREVQGFESATFLGYFKSGLKYKKGGVASGFKHVVPNEVVVQRLFQVKGRRVVRATEVPVSWESFNNGDCFILDLGNNIHQWCGSNSNRYERLKATQVSKGIRDNERSGRARVHVSEEGTEPEAMLQVLGPKPALPAGTEDTAKEDAANRKLAKLYKVSNGAGTMSVSLVADENPFAQGALKSEDCFILDHGKDGKIFVWKGKQANTEERKAALKTASDFITKMDYPKQTQVSVLPEGGETPLFKQFFKNWRDPDQTDGLGLSYLSSHIANVERVPFDAATLHTSTAMAAQHGMDDDGTGQKQIWRIEGSNKVPVDPATYGQFYGGDSYIILYNYRHGGRQGQIIYNWQGAQSTQDEVAASAILTAQLDEELGGTPVQSRVVQGKEPAHLMSLFGGKPMIIYKGGTSREGGQTAPASTRLFQVRANSAGATRAVEVLPKAGALNSNDAFVLKTPSAAYLWVGTGASEAEKTGAQELLRVLRAQPVQVAEGSEPDGFWEALGGKAAYRTSPRLKDKKMDAHPPRLFACSNKIGRFVIEEVPGELMQEDLATDDVMLLDTWDQVFVWVGKDSQEEEKTEALTSAKRYIETDPANRDRRTPITVVKQGFEPPSFVGWFLGWDDDYWSVDPLDRAMAELAA

SEQ ID NO: 156 - DNA, 5748 bp, Homo sapiens
gagaagaaagccagtgcgtctctgggcgcaggggccagtggggctcggaggcacaggcaccccgcgacactccaggttccccgacccacgtccctggcagccccgattatttacagcctcagcagagcacggggcgggggcagaggggcccgcccgggagggctgctacttcttaaaacctctgcgggctgcttagtcacagccccccttgcttgggtgtgtccttcgctcgctccctccctccgtcttaggtcactgttttcaacctcgaataaaaactgcagccaacttccgaggcagcctcattgcccagcggaccccagcctctgccaggttcggtccgccatcctcgtcccgtcctccgccggcccctgccccgcgcccagggatcctccagctcctttcgcccgcgccctccgttcgctccggacaccatggacaagttttggtggcacgcagcctggggactctgcctcgtgccgctgagcctggcgcagatcgatttgaatataacctgccgctttgcaggtgtattccacgtggagaaaaatggtcgctacagcatctctcggacggaggccgctgacctctgcaaggctttcaatagcaccttgcccacaatggcccagatggagaaagctctgagcatcggatttgagacctgcaggtatgggttcatagaagggcacgtggtgattccccggatccaccccaactccatctgtgcagcaaacaacacaggggtgtacatcctcacatccaacacctcccagtatgacacatattgcttcaatgcttcagctccacctgaagaagattgtacatcagtcacagacctgcccaatgcctttgatggaccaattaccataactattgttaaccgtgatggcacccgctatgtccagaaaggagaatacagaacgaatcctgaagacatctaccccagcaaccctactgatgatgacgtgagcagcggctcctccagtgaaaggagcagcacttcaggaggttacatcttttacaccttttctactgtacaccccatcccagacgaagacagtccctggatcaccgacagcacagacagaatccctgctaccactttgatgagcactagtgctacagcaactgagacagcaaccaagaggcaagaaacctgggattggttttcatggttgtttctaccatcagagtcaaagaatcatcttcacacaacaacacaaatggctggtacgtcttcaaataccatctcagcaggctgggagccaaatgaagaaaatgaagatgaaagagacagacacctcagtttttctggatcaggcattgatgatgatgaagattttatctccagcaccatttcaaccacaccacgggcttttgaccacacaaaacagaaccaggactggacccagtggaacccaagccattcaaatccggaagtgctacttcagacaaccacaaggatgactgatgtagacagaaatggcaccactgcttatgaaggaaactggaacccagaagcacaccctcccctcattcaccatgagcatcatgaggaagaagagaccccacattctacaagcacaatccaggcaactcctagtagtacaacggaagaaacagctacccagaaggaacagtggtttggcaacagatggcatgagggatatcgccaaacacccaaagaagactcccattcgacaacagggacagctgcagcctcagctcataccagccatccaatgcaaggaaggacaacaccaagcccagaggacagttcctggactgatttcttcaacccaatctcacaccccatgggacgaggtcatcaagcaggaagaaggatggatatggactccagtcatagtataacgcttcagcctactgcaaatccaaacacaggtttggtggaagatttggacaggacaggacctctttcaatgacaacgcagcagagtaattctcagagcttctctacatcacatgaaggcttggaagaagataaagaccatccaacaacttctactctgacatcaagcaataggaatgatgtcacaggtggaagaagagacccaaatcattctgaaggctcaactactttactggaaggttatacctctcattacccacacacgaaggaaagcaggaccttcatcccagtgacctcagctaagactgggtcctttggagttactgcagttactgttggagattccaactctaatgtcaatcgttccttatcaggagaccaagacacattccaccccagtggggggtcccataccactcatggatctgaatcagatggacactcacatgggagtcaagaaggtggagcaaacacaacctctggtcctataaggacaccccaaattccagaatggctgatcatcttggcatccctcttggccttggctttgattcttgcagtttgcattgcagtcaacagtcgaagaaggtgtgggcagaagaaaaagctagtgatcaacagtggcaatggagctgtggaggacagaaagccaagtggactcaacggagaggccagcaagtctcaggaaatggtgcatttggtgaacaaggagtcgtcagaaactccagaccagtttatgacagctgatgagacaaggaacctgcagaatgtggacatgaagattggggtgtaacacctacaccattatcttggaaagaaacaaccgttggaaacataaccattacagggagctgggacacttaacagatgcaatgtgctactgattgtttcattgcgaatcttttttagcataaaattttctactctttttgttttttgtgttttgttctttaaagtcaggtccaatttgtaaaaacagcattgctttctgaaattagggcccaattaataatcagcaagaatttgatcgttccagttcccacttggaggcctttcatccctcgggtgtgctatggatggcttctaacaaaaactacacatatgtattcctgatcgccaacctttcccccaccagctaaggacatttcccagggttaatagggcctggtccctgggaggaaatttgaatgggtccattttgcccttccatagcctaatccctgggcattgctttccactgaggttgggggttggggtgtactagttacacatcttcaacagaccccctctagaaatttttcagatgcttctgggagacacccaaagggtgaagctatttatctgtagtaaactatttatctgtgtttttgaaatattaaaccctggatcagtcctttgatcagtataattttttaaagttactttgtcagaggcacaaaagggtttaaactgattcataataaatatctgtacttcttcgatcttcaccttttgtgctgtgattcttcagtttctaaaccagcactgtctgggtccctacaatgtatcaggaagagctgagaatggtaaggagactcttctaagtcttcatctcagagaccctgagttcccactcagacccactcagccaaatctcatggaagaccaaggagggcagcactgtttttgttttttgttttttgttttttttttttgacactgtccaaaggttttccatcctgtcctggaatcagagttggaagctgaggagcttcagcctcttttatggtttaatggccacctgttctctcctgtgaaaggctttgcaaagtcacattaagtttgcatgacctgttatccctggggccctatttcatagaggctggccctattagtgatttccaaaaacaatatggaagtgccttttgatgtcttacaataagagaagaagccaatggaaatgaaagagattggcaaaggggaaggatgatgccatgtagatcctgtttgacatttttatggctgtatttgtaaacttaaacacaccagtgtctgttcttgatgcagttgctatttaggatgagttaagtgcctggggagtccctcaaaaggttaaagggattcccatcattggaatcttatcaccagataggcaagtttatgaccaaacaagagagtactggctttatcctctaacctcatattttctcccacttggcaagtcctttgtggcatttattcatcagtcagggtgtccgattggtcctagaacttccaaaggctgcttgtcatagaagccattgcatctataaagcaacggctcctgttaaatggtatctcctttctgaggctcctactaaaagtcatttgttacctaaacttatgtgcttaacaggcaatgcttctcagaccacaaagcagaaagaagaagaaaagctcctgactaaatcagggctgggcttagacagagttgatctgtagaatatctttaaaggagagatgtcaactttctgcactattcccagcctctgctcctccctgtctaccctctcccctccctctctccctccacttcaccccacaatcttgaaaaacttcctttctcttctgtgaacatcattggccagatccattttcagtggtctggatttctttttattttcttttcaacttgaaagaaactggacattaggccactatgtgttgttactgccactagtgttcaagtgcctcttgttttcccagagatttcctgggtctgccagaggcccagacaggctcactcaagctctttaactgaaaagcaacaagccactccaggacaaggttcaaaatggttacaacagcctctacctgtcgccccagggagaaaggggtagtgatacaagtctcatagccagagatggttttccactccttctagatattcccaaaaagaggctgagacaggaggttattttcaattttattttggaattaaatacttttttccctttattactgttgtagtccctcacttggatatacctctgttttcacgatagaaataagggaggtctagagcttctattccttggccattgtcaacggagagctggccaagtcttcacaaacccttgcaacattgcctgaagtttatggaataagatgtattctcactcccttgatctcaagggcgtaactctggaagcacagcttgactacacgtcatttttaccaatgattttcaggtgacctgggctaagtcatttaaactgggtctttataaaagtaaaaggccaacatttaattattttgcaaagcaacctaagagctaaagatgtaatttttcttgcaattgtaaatcttttgtgtctcctgaagacttcccttaaaattagctctgagtgaaaaatcaaaagagacaaaagacatcttcgaatccatatttcaagcctggtagaattggcttttctagcagaacctttccaaaagttttatattgagattcataacaacaccaagaattgattttgtagccaacattcattcaatactgttatatcagaggagtaggagagaggaaacatttgacttatctggaaaagcaaaatgtacttaagaataagaataacatggtccattcacctttatgttatagatatgtctttgtgtaaatcatttgttttgagttttcaaagaatagcccattgttcattcttgtgctgtacaatgaccactgttattgttactttgacttttcagagcacacccttcctctggtttttgtatatttattgatggatcaataataatgaggaaagcatgatatgtatattgctgagttgaaagcacttattggaaaatattaaaaggctaacattaaaagactaaaggaaacagaaaaaaaaaaaaaaaaa

SEQ ID NO: 157 - protein, 742 aa, Homo sapiens
MDKFWWHAAWGLCLVPLSLAQIDLNITCRFAGVFHVEKNGRYSISRTEAADLCKAFNSTLPTMAQMEKALSIGFETCRYGFIEGHVVIPRIHPNSICAANNTGVYILTSNTSQYDTYCFNASAPPEEDCTSVTDLPNAFDGPITITIVNRDGTRYVQKGEYRTNPEDIYPSNPTDDDVSSGSSSERSSTSGGYIFYTFSTVHPIPDEDSPWITDSTDRIPATTLMSTSATATETATKRQETWDWFSWLFLPSESKNHLHTTTQMAGTSSNTISAGWEPNEENEDERDRHLSFSGSGIDDDEDFISSTISTTPRAFDHTKQNQDWTQWNPSHSNPEVLLQTTTRMTDVDRNGTTAYEGNWNPEAHPPLIHHEHHEEEETPHSTSTIQATPSSTTEETATQKEQWFGNRWHEGYRQTPKEDSHSTTGTAAASAHTSHPMQGRTTPSPEDSSWTDFFNPISHPMGRGHQAGRRMDMDSSHSITLQPTANPNTGLVEDLDRTGPLSMTTQQSNSQSFSTSHEGLEEDKDHPTTSTLTSSNRNDVTGGRRDPNHSEGSTTLLEGYTSHYPHTKESRTFIPVTSAKTGSFGVTAVTVGDSNSNVNRSLSGDQDTFHPSGGSHTTHGSESDGHSHGSQEGGANTTSGPIRTPQIPEWLIILASLLALALILAVCIAVNSRRRCGQKKKLVINSGNGAVEDRKPSGLNGEASKSQEMVHLVNKESSETPDQFMTADETRNLQNVDMKIGV

SEQ ID NO: 158 - DNA, 5619 bp, Homo sapiens
gagaagaaagccagtgcgtctctgggcgcaggggccagtggggctcggaggcacaggcaccccgcgacactccaggttccccgacccacgtccctggcagccccgattatttacagcctcagcagagcacggggcgggggcagaggggcccgcccgggagggctgctacttcttaaaacctctgcgggctgcttagtcacagccccccttgcttgggtgtgtccttcgctcgctccctccctccgtcttaggtcactgttttcaacctcgaataaaaactgcagccaacttccgaggcagcctcattgcccagcggaccccagcctctgccaggttcggtccgccatcctcgtcccgtcctccgccggcccctgccccgcgcccagggatcctccagctcctttcgcccgcgccctccgttcgctccggacaccatggacaagttttggtggcacgcagcctggggactctgcctcgtgccgctgagcctggcgcagatcgatttgaatataacctgccgctttgcaggtgtattccacgtggagaaaaatggtcgctacagcatctctcggacggaggccgctgacctctgcaaggctttcaatagcaccttgcccacaatggcccagatggagaaagctctgagcatcggatttgagacctgcaggtatgggttcatagaagggcacgtggtgattccccggatccaccccaactccatctgtgcagcaaacaacacaggggtgtacatcctcacatccaacacctcccagtatgacacatattgcttcaatgcttcagctccacctgaagaagattgtacatcagtcacagacctgcccaatgcctttgatggaccaattaccataactattgttaaccgtgatggcacccgctatgtccagaaaggagaatacagaacgaatcctgaagacatctaccccagcaaccctactgatgatgacgtgagcagcggctcctccagtgaaaggagcagcacttcaggaggttacatcttttacaccttttctactgtacaccccatcccagacgaagacagtccctggatcaccgacagcacagacagaatccctgctaccagtacgtcttcaaataccatctcagcaggctgggagccaaatgaagaaaatgaagatgaaagagacagacacctcagtttttctggatcaggcattgatgatgatgaagattttatctccagcaccatttcaaccacaccacgggcttttgaccacacaaaacagaaccaggactggacccagtggaacccaagccattcaaatccggaagtgctacttcagacaaccacaaggatgactgatgtagacagaaatggcaccactgcttatgaaggaaactggaacccagaagcacaccctcccctcattcaccatgagcatcatgaggaagaagagaccccacattctacaagcacaatccaggcaactcctagtagtacaacggaagaaacagctacccagaaggaacagtggtttggcaacagatggcatgagggatatcgccaaacacccaaagaagactcccattcgacaacagggacagctgcagcctcagctcataccagccatccaatgcaaggaaggacaacaccaagcccagaggacagttcctggactgatttcttcaacccaatctcacaccccatgggacgaggtcatcaagcaggaagaaggatggatatggactccagtcatagtataacgcttcagcctactgcaaatccaaacacaggtttggtggaagatttggacaggacaggacctctttcaatgacaacgcagcagagtaattctcagagcttctctacatcacatgaaggcttggaagaagataaagaccatccaacaacttctactctgacatcaagcaataggaatgatgtcacaggtggaagaagagacccaaatcattctgaaggctcaactactttactggaaggttatacctctcattacccacacacgaaggaaagcaggaccttcatcccagtgacctcagctaagactgggtcctttggagttactgcagttactgttggagattccaactctaatgtcaatcgttccttatcaggagaccaagacacattccaccccagtggggggtcccataccactcatggatctgaatcagatggacactcacatgggagtcaagaaggtggagcaaacacaacctctggtcctataaggacaccccaaattccagaatggctgatcatcttggcatccctcttggccttggctttgattcttgcagtttgcattgcagtcaacagtcgaagaaggtgtgggcagaagaaaaagctagtgatcaacagtggcaatggagctgtggaggacagaaagccaagtggactcaacggagaggccagcaagtctcaggaaatggtgcatttggtgaacaaggagtcgtcagaaactccagaccagtttatgacagctgatgagacaaggaacctgcagaatgtggacatgaagattggggtgtaacacctacaccattatcttggaaagaaacaaccgttggaaacataaccattacagggagctgggacacttaacagatgcaatgtgctactgattgtttcattgcgaatcttttttagcataaaattttctactctttttgttttttgtgttttgttctttaaagtcaggtccaatttgtaaaaacagcattgctttctgaaattagggcccaattaataatcagcaagaatttgatcgttccagttcccacttggaggcctttcatccctcgggtgtgctatggatggcttctaacaaaaactacacatatgtattcctgatcgccaacctttcccccaccagctaaggacatttcccagggttaatagggcctggtccctgggaggaaatttgaatgggtccattttgcccttccatagcctaatccctgggcattgctttccactgaggttgggggttggggtgtactagttacacatcttcaacagaccccctctagaaatttttcagatgcttctgggagacacccaaagggtgaagctatttatctgtagtaaactatttatctgtgtttttgaaatattaaaccctggatcagtcctttgatcagtataattttttaaagttactttgtcagaggcacaaaagggtttaaactgattcataataaatatctgtacttcttcgatcttcaccttttgtgctgtgattcttcagtttctaaaccagcactgtctgggtccctacaatgtatcaggaagagctgagaatggtaaggagactcttctaagtcttcatctcagagaccctgagttcccactcagacccactcagccaaatctcatggaagaccaaggagggcagcactgtttttgttttttgttttttgttttttttttttgacactgtccaaaggttttccatcctgtcctggaatcagagttggaagctgaggagcttcagcctcttttatggtttaatggccacctgttctctcctgtgaaaggctttgcaaagtcacattaagtttgcatgacctgttatccctggggccctatttcatagaggctggccctattagtgatttccaaaaacaatatggaagtgccttttgatgtcttacaataagagaagaagccaatggaaatgaaagagattggcaaaggggaaggatgatgccatgtagatcctgtttgacatttttatggctgtatttgtaaacttaaacacaccagtgtctgttcttgatgcagttgctatttaggatgagttaagtgcctggggagtccctcaaaaggttaaagggattcccatcattggaatcttatcaccagataggcaagtttatgaccaaacaagagagtactggctttatcctctaacctcatattttctcccacttggcaagtcctttgtggcatttattcatcagtcagggtgtccgattggtcctagaacttccaaaggctgcttgtcatagaagccattgcatctataaagcaacggctcctgttaaatggtatctcctttctgaggctcctactaaaagtcatttgttacctaaacttatgtgcttaacaggcaatgcttctcagaccacaaagcagaaagaagaagaaaagctcctgactaaatcagggctgggcttagacagagttgatctgtagaatatctttaaaggagagatgtcaactttctgcactattcccagcctctgctcctccctgtctaccctctcccctccctctctccctccacttcaccccacaatcttgaaaaacttcctttctcttctgtgaacatcattggccagatccattttcagtggtctggatttctttttattttcttttcaacttgaaagaaactggacattaggccactatgtgttgttactgccactagtgttcaagtgcctcttgttttcccagagatttcctgggtctgccagaggcccagacaggctcactcaagctctttaactgaaaagcaacaagccactccaggacaaggttcaaaatggttacaacagcctctacctgtcgccccagggagaaaggggtagtgatacaagtctcatagccagagatggttttccactccttctagatattcccaaaaagaggctgagacaggaggttattttcaattttattttggaattaaatacttttttccctttattactgttgtagtccctcacttggatatacctctgttttcacgatagaaataagggaggtctagagcttctattccttggccattgtcaacggagagctggccaagtcttcacaaacccttgcaacattgcctgaagtttatggaataagatgtattctcactcccttgatctcaagggcgtaactctggaagcacagcttgactacacgtcatttttaccaatgattttcaggtgacctgggctaagtcatttaaactgggtctttataaaagtaaaaggccaacatttaattattttgcaaagcaacctaagagctaaagatgtaatttttcttgcaattgtaaatcttttgtgtctcctgaagacttcccttaaaattagctctgagtgaaaaatcaaaagagacaaaagacatcttcgaatccatatttcaagcctggtagaattggcttttctagcagaacctttccaaaagttttatattgagattcataacaacaccaagaattgattttgtagccaacattcattcaatactgttatatcagaggagtaggagagaggaaacatttgacttatctggaaaagcaaaatgtacttaagaataagaataacatggtccattcacctttatgttatagatatgtctttgtgtaaatcatttgttttgagttttcaaagaatagcccattgttcattcttgtgctgtacaatgaccactgttattgttactttgacttttcagagcacacccttcctctggtttttgtatatttattgatggatcaataataatgaggaaagcatgatatgtatattgctgagttgaaagcacttattggaaaatattaaaaggctaacattaaaagactaaaggaaacagaaaaaaaaaaaaaaaaa

SEQ ID NO: 159 - protein, 699 aa, Homo sapiens
MDKFWWHAAWGLCLVPLSLAQIDLNITCRFAGVFHVEKNGRYSISRTEAADLCKAFNSTLPTMAQMEKALSIGFETCRYGFIEGHVVIPRIHPNSICAANNTGVYILTSNTSQYDTYCFNASAPPEEDCTSVTDLPNAFDGPITITIVNRDGTRYVQKGEYRTNPEDIYPSNPTDDDVSSGSSSERSSTSGGYIFYTFSTVHPIPDEDSPWITDSTDRIPATSTSSNTISAGWEPNEENEDERDRHLSFSGSGIDDDEDFISSTISTTPRAFDHTKQNQDWTQWNPSHSNPEVLLQTTTRMTDVDRNGTTAYEGNWNPEAHPPLIHHEHHEEEETPHSTSTIQATPSSTTEETATQKEQWFGNRWHEGYRQTPKEDSHSTTGTAAASAHTSHPMQGRTTPSPEDSSWTDFFNPISHPMGRGHQAGRRMDMDSSHSITLQPTANPNTGLVEDLDRTGPLSMTTQQSNSQSFSTSHEGLEEDKDHPTTSTLTSSNRNDVTGGRRDPNHSEGSTTLLEGYTSHYPHTKESRTFIPVTSAKTGSFGVTAVTVGDSNSNVNRSLSGDQDTFHPSGGSHTTHGSESDGHSHGSQEGGANTTSGPIRTPQIPEWLIILASLLALALILAVCIAVNSRRRCGQKKKLVINSGNGAVEDRKPSGLNGEASKSQEMVHLVNKESSETPDQFMTADETRNLQNVDMKIGV

SEQ ID NO: 160 - DNA, 5001 bp, Homo sapiens
gagaagaaagccagtgcgtctctgggcgcaggggccagtggggctcggaggcacaggcaccccgcgacactccaggttccccgacccacgtccctggcagccccgattatttacagcctcagcagagcacggggcgggggcagaggggcccgcccgggagggctgctacttcttaaaacctctgcgggctgcttagtcacagccccccttgcttgggtgtgtccttcgctcgctccctccctccgtcttaggtcactgttttcaacctcgaataaaaactgcagccaacttccgaggcagcctcattgcccagcggaccccagcctctgccaggttcggtccgccatcctcgtcccgtcctccgccggcccctgccccgcgcccagggatcctccagctcctttcgcccgcgccctccgttcgctccggacaccatggacaagttttggtggcacgcagcctggggactctgcctcgtgccgctgagcctggcgcagatcgatttgaatataacctgccgctttgcaggtgtattccacgtggagaaaaatggtcgctacagcatctctcggacggaggccgctgacctctgcaaggctttcaatagcaccttgcccacaatggcccagatggagaaagctctgagcatcggatttgagacctgcaggtatgggttcatagaagggcacgtggtgattccccggatccaccccaactccatctgtgcagcaaacaacacaggggtgtacatcctcacatccaacacctcccagtatgacacatattgcttcaatgcttcagctccacctgaagaagattgtacatcagtcacagacctgcccaatgcctttgatggaccaattaccataactattgttaaccgtgatggcacccgctatgtccagaaaggagaatacagaacgaatcctgaagacatctaccccagcaaccctactgatgatgacgtgagcagcggctcctccagtgaaaggagcagcacttcaggaggttacatcttttacaccttttctactgtacaccccatcccagacgaagacagtccctggatcaccgacagcacagacagaatccctgctaccaatatggactccagtcatagtataacgcttcagcctactgcaaatccaaacacaggtttggtggaagatttggacaggacaggacctctttcaatgacaacgcagcagagtaattctcagagcttctctacatcacatgaaggcttggaagaagataaagaccatccaacaacttctactctgacatcaagcaataggaatgatgtcacaggtggaagaagagacccaaatcattctgaaggctcaactactttactggaaggttatacctctcattacccacacacgaaggaaagcaggaccttcatcccagtgacctcagctaagactgggtcctttggagttactgcagttactgttggagattccaactctaatgtcaatcgttccttatcaggagaccaagacacattccaccccagtggggggtcccataccactcatggatctgaatcagatggacactcacatgggagtcaagaaggtggagcaaacacaacctctggtcctataaggacaccccaaattccagaatggctgatcatcttggcatccctcttggccttggctttgattcttgcagtttgcattgcagtcaacagtcgaagaaggtgtgggcagaagaaaaagctagtgatcaacagtggcaatggagctgtggaggacagaaagccaagtggactcaacggagaggccagcaagtctcaggaaatggtgcatttggtgaacaaggagtcgtcagaaactccagaccagtttatgacagctgatgagacaaggaacctgcagaatgtggacatgaagattggggtgtaacacctacaccattatcttggaaagaaacaaccgttggaaacataaccattacagggagctgggacacttaacagatgcaatgtgctactgattgtttcattgcgaatcttttttagcataaaattttctactctttttgttttttgtgttttgttctttaaagtcaggtccaatttgtaaaaacagcattgctttctgaaattagggcccaattaataatcagcaagaatttgatcgttccagttcccacttggaggcctttcatccctcgggtgtgctatggatggcttctaacaaaaactacacatatgtattcctgatcgccaacctttcccccaccagctaaggacatttcccagggttaatagggcctggtccctgggaggaaatttgaatgggtccattttgcccttccatagcctaatccctgggcattgctttccactgaggttgggggttggggtgtactagttacacatcttcaacagaccccctctagaaatttttcagatgcttctgggagacacccaaagggtgaagctatttatctgtagtaaactatttatctgtgtttttgaaatattaaaccctggatcagtcctttgatcagtataattttttaaagttactttgtcagaggcacaaaagggtttaaactgattcataataaatatctgtacttcttcgatcttcaccttttgtgctgtgattcttcagtttctaaaccagcactgtctgggtccctacaatgtatcaggaagagctgagaatggtaaggagactcttctaagtcttcatctcagagaccctgagttcccactcagacccactcagccaaatctcatggaagaccaaggagggcagcactgtttttgttttttgttttttgttttttttttttgacactgtccaaaggttttccatcctgtcctggaatcagagttggaagctgaggagcttcagcctcttttatggtttaatggccacctgttctctcctgtgaaaggctttgcaaagtcacattaagtttgcatgacctgttatccctggggccctatttcatagaggctggccctattagtgatttccaaaaacaatatggaagtgccttttgatgtcttacaataagagaagaagccaatggaaatgaaagagattggcaaaggggaaggatgatgccatgtagatcctgtttgacatttttatggctgtatttgtaaacttaaacacaccagtgtctgttcttgatgcagttgctatttaggatgagttaagtgcctggggagtccctcaaaaggttaaagggattcccatcattggaatcttatcaccagataggcaagtttatgaccaaacaagagagtactggctttatcctctaacctcatattttctcccacttggcaagtcctttgtggcatttattcatcagtcagggtgtccgattggtcctagaacttccaaaggctgcttgtcatagaagccattgcatctataaagcaacggctcctgttaaatggtatctcctttctgaggctcctactaaaagtcatttgttacctaaacttatgtgcttaacaggcaatgcttctcagaccacaaagcagaaagaagaagaaaagctcctgactaaatcagggctgggcttagacagagttgatctgtagaatatctttaaaggagagatgtcaactttctgcactattcccagcctctgctcctccctgtctaccctctcccctccctctctccctccacttcaccccacaatcttgaaaaacttcctttctcttctgtgaacatcattggccagatccattttcagtggtctggatttctttttattttcttttcaacttgaaagaaactggacattaggccactatgtgttgttactgccactagtgttcaagtgcctcttgttttcccagagatttcctgggtctgccagaggcccagacaggctcactcaagctctttaactgaaaagcaacaagccactccaggacaaggttcaaaatggttacaacagcctctacctgtcgccccagggagaaaggggtagtgatacaagtctcatagccagagatggttttccactccttctagatattcccaaaaagaggctgagacaggaggttattttcaattttattttggaattaaatacttttttccctttattactgttgtagtccctcacttggatatacctctgttttcacgatagaaataagggaggtctagagcttctattccttggccattgtcaacggagagctggccaagtcttcacaaacccttgcaacattgcctgaagtttatggaataagatgtattctcactcccttgatctcaagggcgtaactctggaagcacagcttgactacacgtcatttttaccaatgattttcaggtgacctgggctaagtcatttaaactgggtctttataaaagtaaaaggccaacatttaattattttgcaaagcaacctaagagctaaagatgtaatttttcttgcaattgtaaatcttttgtgtctcctgaagacttcccttaaaattagctctgagtgaaaaatcaaaagagacaaaagacatcttcgaatccatatttcaagcctggtagaattggcttttctagcagaacctttccaaaagttttatattgagattcataacaacaccaagaattgattttgtagccaacattcattcaatactgttatatcagaggagtaggagagaggaaacatttgacttatctggaaaagcaaaatgtacttaagaataagaataacatggtccattcacctttatgttatagatatgtctttgtgtaaatcatttgttttgagttttcaaagaatagcccattgttcattcttgtgctgtacaatgaccactgttattgttactttgacttttcagagcacacccttcctctggtttttgtatatttattgatggatcaataataatgaggaaagcatgatatgtatattgctgagttgaaagcacttattggaaaatattaaaaggctaacattaaaagactaaaggaaacagaaaaaaaaaaaaaaaaa

SEQ ID NO: 161 - protein, 493 aa, Homo sapiens
MDKFWWHAAWGLCLVPLSLAQIDLNITCRFAGVFHVEKNGRYSISRTEAADLCKAFNSTLPTMAQMEKALSIGFETCRYGFIEGHVVIPRIHPNSICAANNTGVYILTSNTSQYDTYCFNASAPPEEDCTSVTDLPNAFDGPITITIVNRDGTRYVQKGEYRTNPEDIYPSNPTDDDVSSGSSSERSSTSGGYIFYTFSTVHPIPDEDSPWITDSTDRIPATNMDSSHSITLQPTANPNTGLVEDLDRTGPLSMTTQQSNSQSFSTSHEGLEEDKDHPTTSTLTSSNRNDVTGGRRDPNHSEGSTTLLEGYTSHYPHTKESRTFIPVTSAKTGSFGVTAVTVGDSNSNVNRSLSGDQDTFHPSGGSHTTHGSESDGHSHGSQEGGANTTSGPIRTPQIPEWLIILASLLALALILAVCIAVNSRRRCGQKKKLVINSGNGAVEDRKPSGLNGEASKSQEMVHLVNKESSETPDQFMTADETRNLQNVDMKIGV

SEQ ID NO: 162 - DNA, 2209 bp, Homo sapiens
gacagactcccagaagatctgagcgagtcgcgtagctgagcccggcaggggctggggtggtgctgctgctatgagctgcaccatcgagaagatcctgacagacgccaagacgctgctggagaggctacgggagcacgatgcggccgccgagtcgctggtggatcagtcggcggcgctgcaccggcgggtagcagctatgcgggaggcggggacagcgcttccggaccagtatcaagaggatgcatccgatatgaaggacatgtccaaatacaaacctcacattctgctgtcccaagagaacacacagattagagacttgcaacaggaaaacagagagctatggatttccttggaggaacaccaggatgctttggaacttatcatgagcaaatatcggaaacagatgttacagttaatggttgctaaaaaagcggtggatgctgaaccagtcctgaaagctcaccagtctcactctgcagaaattgagagtcagattgacagaatctgtgaaatgggagaagtgatgaggaaagcagttcaggtggatgatgaccagttttgtaagattcaggaaatattagcccaattagagcttgaaaataaggaacttcgagaattattgtccatcagcagtgagtctcatcaagccagaaaggaaaactcaatggacactgcttcccaagccatcaaataactgaactctgaatgatggctggagattgtctatcaaggaaggaagttactgtcttcccattcaagtactgtccattaagtgtcttgcctcagatttgatttaatcttaattaaaggtatcaggtggcaatttagaattccagtcaatattggctgtccacagttctcagatgtgttaatgtgaatactacatgctgaatttcaccattcctttctcaaagagactacttttaattttcatttctgggaccttgatttatataaactatgttttcagttctttgttatttttcacatctctgaaactttgagcattttttataagccagcaatttattttacatagcattgtaaaatacacttctaggaaattttaggaaagatttaactgtttaaatctatttggcataaaccttgattttttttttccatttgacaaaaataatacaattccacagaactagatcagcagattctctgatttgtaatgtcattcacctgtgacattttaagtctctctggtgctaagaattggcactttatagcctggtgcctttacttttaatttgagagaacctactgctagtcccaggaaacacacttggaaataagtcagctattttttttgcccagtgatgctatagttgtcatattgtccaaagttcatattgttcaaagctgaggagcttgtcctgtgtatgtgaatgcacacatgtgcacttagttcaaatactaaaagtagcttttattaaatataatcagccaaaaacacacacaaaataaaaaaaacaaatataagtagtcagtttttcaatgttatcctactagttctacattctattttaatttttatacaatttccattttatagttaagaaccatcacttacttggattggatgtctttcattcctagcactaatagttggctttctttttttttgtttacatagaagcagggtttttttttatcttttttctttttttttgtttaagctatataaaaaggtgaggaagcagttttgttacctaatgaaaattattacactcataatgctgtgtaggcaacattgagattcaaatgcccagtggtcaactgggttcactcatcaactcattcccgtcccagtttactcacatttcaaatttataaatttcttcatgttatactattctatttagatttgcccagaattagttgaaataatgctaaacctgtcaatattttccagtaacattaagcaccatactgcatgggagagacacagtactaaaaagagttgttagtgctttatgtgagtgatatttctttcgtaatgctataaagaactacagttaaaataacaaaatattttaaagatgtcctaaaagcatctgatcccagtaataactaatggatgtcatctagagcagtgggtgttaatgaataggtatatgtcatttaagaatttttcaaatttctgtttgatatcctgcatagaatttgacaaaaaaaacaaaaaaaaaaaaaaaaaaaa

SEQ ID NO: 163 - protein, 207 aa, Homo sapiens
MSCTIEKILTDAKTLLERLREHDAAAESLVDQSAALHRRVAAMREAGTALPDQYQEDASDMKDMSKYKPHILLSQENTQIRDLQQENRELWISLEEHQDALELIMSKYRKQMLQLMVAKKAVDAEPVLKAHQSHSAEIESQIDRICEMGEVMRKAVQVDDDQFCKIQEILAQLELENKELRELLSISSESHQARKENSMDTASQAIK

SEQ ID NO: 164 - DNA, 4441 bp, Homo sapiens
ctctgaggagacactttttttttcctccctccttccctcctctcctcctcccttcccttcccctctcctcccctctctcctccttcccccctcggtccgccggagcctgctggggcgagcggttggtattgcaggcgcttgctctccggggccgcccggcgggtagctggcggggggaggaggcaggaaccgcgatggcgcctcagaagcacggcggtgggggagggggcggctcggggcccagcgcggggtccgggggaggcggcttcgggggttcggcggcggtggcggcggcgacggcttcgggcggcaaatccggcggcgggagctgtggagggggtggcagttactcggcctcctcctcctcctccgcggcggcagcggcgggggctgcggtgttaccggtgaagaagccgaaaatggagcacgtccaggctgaccacgagcttttcctccaggcctttgagaagccaacacagatctatagatttcttcgaactcggaatctcatagcaccaatatttttgcacagaactcttacttacatgtctcatcgaaactccagaacaaacatcaaaaggaaaacatttaaagttgatgatatgttatcaaaagtagagaaaatgaaaggagagcaagaatctcatagcttgtcagctcatttgcagcttacgtttactggtttcttccacaaaaatgataagccatcaccaaactcagaaaatgaacaaaattctgttaccctggaagtcctgcttgtgaaagtttgccacaaaaaaagaaaggatgtaagttgtccaataaggcaagttcccacaggtaaaaagcaggtgcctttgattcctgacctcaatcaaacaaaacccggaaatttcccgtcccttgcagtttccagtaatgaatttgaacctagtaacagccatatggtgaagtcttactcgttgctatttagagtgactcgtccaggaagaagagagtttaatggaatgattaatggagaaaccaatgaaaatattgatgtcaatgaagagcttccagccagaagaaaacgaaatcgtgaggatggggaaaagacatttgttgcacaaatgacagtatttgataaaaacaggcgcttacagcttttagatggggaatatgaagtagccatgcaggaaatggaagaatgtccaataagcaagaaaagagcaacatgggagactattcttgatgggaagaggctgcctccattcgaaacattttctcagggacctacgttgcagttcactcttcgttggacaggagagaccaatgataaatctacggctcctattgccaaacctcttgccactagaaattcagagagtctccatcaggaaaacaagcctggttcagttaaacctactcaaactattgctgttaaagaatcattgactacagatctacaaacaagaaaagaaaaggatactccaaatgaaaaccgacaaaaattaagaatattttatcagtttctctataacaacaatacaaggcaacaaactgaagcaagagatgacctgcattgcccttggtgtactctgaactgccgcaaactttatagtttactcaagcatcttaaactctgccatagcagatttatcttcaactatgtttatcatccaaaaggtgctaggatagatgtttctatcaatgagtgttatgatggctcctatgcaggaaatcctcaggatattcatcgccaacctggatttgcttttagtcgcaacggaccagttaagagaacacctatcacacatattcttgtgtgcaggccaaaacgaacaaaagcaagcatgtctgaatttcttgaatctgaagatggggaagtagaacagcaaagaacatatagtagtggccacaatcgtctgtatttccatagtgatacctgcttacctctccgtccacaagaaatggaagtagatagtgaagatgaaaaggatcctgaatggctaagagaaaaaaccattacacaaattgaagagttttctgatgttaatgaaggagagaaagaagtgatgaaactctggaatctccatgtcatgaagcatgggtttattgctgacaatcaaatgaatcatgcctgtatgctgtttgtagaaaattatggacagaaaataattaagaagaatttatgtcgaaacttcatgcttcatctagtcagcatgcatgactttaatcttattagcataatgtcaatagataaagctgttaccaagctccgtgaaatgcagcaaaaattagaaaagggggaatctgcttcccctgcaaacgaagaaataactgaagaacaaaatgggacagcaaatggatttagtgaaattaactcaaaagagaaagctttggaaacagatagtgtctcaggggtttcaaaacagagcaaaaaacaaaaactctgaaaagctctaaccccatgttatggacaaacactgaaattacattttagggaattcatcctctaagaattatgtttttgtttttaatcatatgttccaaacaggcactgttagatgaagtaaatgatttcaacaaggatatttgtatcagggttctacttcacttcattatgcagcattacatgtatatcacttttattgatgtcattaaaacattctgtactttaagcatgaaaagcaatatttcaaagtatttttaaactcaacaaatgtcatcaaatatgttgaattgatctagaaattatttcatatataaatcagaatttttttgcatttatgaacggctgtttttctactttgtaattgtgagacattttcttggggagggaaaattggaatggttcccttttttagaaattgaagtggtcttcatatgtcaactacagaaaaggaaaaaaatagaaattgaaggatttttatgaaattatattgcattactatttgcagtcaaactttgatccttgtttttgaaatcatttgtcaattcggaatgaaaaattataatgtaattttacattacataagttccttttacaattaaaaaatagcacttcttcatcttatgcctgtttgagaagatattaaattttcacattgttgacagtgaaatgctatgttggtttataagattacagaccatttgttttcatgtggataattttagtgcattgctcacccggtatgttttttttttttaacttgaacattttgcttgttttgtttttcttttttaattagataatcacacggaaaattaagctgttcatatctttaaattaggattgcaaaccaaggaaagaacgcatttgagattttaagatgtcacttataaggggagaagtgttcttaaaaagtcaaccagaaaactgttatgccttttatttgtttgcaaggatgtctttgtaatgtgtttcatgaatagaatatccaatagagataagctgacttgaatcattttgagcaattttgccctgtgttatatgtgtttcacgcacatatttgcagttggattttctccaacagaaagtggattcactactggcacattaacaagcaccaataggtttttattccaactccgagcactgtggttgagtaacatcacctcaattttttattatccttaaagatattgcattttcatattctttatttataaaggatcaatgctgctgtaaatacaggtatttttaattttaaaatttcattccaccaccatcagatgcagttccctattttgtttaatgaagggatatataagctttctaatggtgtcttcagaaatttataaaatgtaaatactgatttgactggtctttaagatgtgtttaactgtgaggctatttaacgaatagtgtggatgtgatttgtcatccagtattaagttcttagtcattgatttttgtgtttaaaaaaaaataggaaagagggaaactgcagctttcattacagattccttgattggtaagctctccaaatgatgagttctagtaaactctgatttttgcctctggatagtagatctcgagcgtttatctcgggctttaatttgctaaagctgtgcacatatgtaaaaaaaaaaaaaaaaagattattttaggggagatgtaggtgtagaattattgcttatgtcatttcttaagcagttatgctcttaatgcttaaaagaaggctagcattgtttgcacaaaaagttggtgattcccaccccaaatagtaataaaattacttctgttgagtaaactttttatgtcatcgtaaaagctggaaaaatccctttgtttctatttataaaaaaagtgcttttctatatgtacccttgataacagattttgaagaaatcctgtaagatgataaagcatttgaatggtacagtagatgtaaaaaaaattcagtttaaaagaacatttgtttttacattaaatgtttatttgaaatcaaatgattttgtacataaagttcaataatat

SEQ ID NO: 165 - protein, 739 aa, Homo sapiens
MAPQKHGGGGGGGSGPSAGSGGGGFGGSAAVAAATASGGKSGGGSCGGGGSYSASSSSSAAAAAGAAVLPVKKPKMEHVQADHELFLQAFEKPTQIYRFLRTRNLIAPIFLHRTLTYMSHRNSRTNIKRKTFKVDDMLSKVEKMKGEQESHSLSAHLQLTFTGFFHKNDKPSPNSENEQNSVTLEVLLVKVCHKKRKDVSCPIRQVPTGKKQVPLIPDLNQTKPGNFPSLAVSSNEFEPSNSHMVKSYSLLFRVTRPGRREFNGMINGETNENIDVNEELPARRKRNREDGEKTFVAQMTVFDKNRRLQLLDGEYEVAMQEMEECPISKKRATWETILDGKRLPPFETFSQGPTLQFTLRWTGETNDKSTAPIAKPLATRNSESLHQENKPGSVKPTQTIAVKESLTTDLQTRKEKDTPNENRQKLRIFYQFLYNNNTRQQTEARDDLHCPWCTLNCRKLYSLLKHLKLCHSRFIFNYVYHPKGARIDVSINECYDGSYAGNPQDIHRQPGFAFSRNGPVKRTPITHILVCRPKRTKASMSEFLESEDGEVEQQRTYSSGHNRLYFHSDTCLPLRPQEMEVDSEDEKDPEWLREKTITQIEEFSDVNEGEKEVMKLWNLHVMKHGFIADNQMNHACMLFVENYGQKIIKKNLCRNFMLHLVSMHDFNLISIMSIDKAVTKLREMQQKLEKGESASPANEEITEEQNGTANGFSEINSKEKALETDSVSGVSKQSKKQKL

SEQ ID NO: 166 - DNA, 12227 bp, Homo sapiens
tgagctgcgaggcccgagagtcagaacctgggggagagggatggtctctgcacgggggggagccggaggagccgccgccgctgccgacgccaccgccgcagccgccgccgccgccgccccggcacccgcctcccggcgctgacggtctcgtacgaagccggcgagggggagccagcagcggcggtcgccggcacgccgcccagcatggtccgggaaaccaggcatctctgggtgggcaacttacccgagaacgtgcgggaagagaagatcatcgagcatttcaaacgatatggccgcgtggaaagtgtcaaaattcttcccaagaggggatctgaaggaggagtggctgcctttgtggattttgtggacatcaaaagtgcacagaaagctcacaactcggtcaacaaaatgggtgacagagacctacgcacggattataatgaaccaggcaccatcccgagtgctgctcggggattggatgatacagtttccatagcatctcgtagtagagaggtttctgggttcagaggaggtggtggagggcctgcttatggtcccccaccgtcacttcatgcacgagaaggacgttatgagcggagacttgatggggcttcagataacagggagcgtgcttatgaacatagtgcctatggacaccatgaacgggggacgggaggatttgatcggacaagacattacgatcaggattactatagagatcctcgagagcggactttacaacatgggctctattacgcttctcggagtcgaagtccaaatcgctttgatgctcatgacccccgatatgaacctagggctcgcgagcagtttacactgcccagtgtggtacacagggatatctacagggatgatattacccgggaggtacgaggcagaaggccagagcggaattaccagcacagcaggagtcggtcaccacattcatcccagtctagaaatcagtctcctcagagactggctagccaagcatctagacccacaaggtcccctagcggcagcggctctagaagtagatcctccagtagtgattcaatcagcagcagcagtagtaccagcagtgacagcagtgattccagcagtagttcaagtgatgattctccagctcgatcagttcagtctgcagcagtccctgcacccacttcccagttgctttcatctctggaaaaagatgagccccgtaaaagttttggcatcaaggtccagaatcttccagtacgctctacagatacaagccttaaagatggccttttccatgaatttaagaaatttggaaaagtaacttcagtgcagatacatggaacttcagaagagaggtatggtctggtattctttcggcagcaagaggaccaagaaaaagccttgactgcatcaaaaggaaaacttttctttggcatgcagattgaagtaacagcatggataggtccagaaacagaaagtgaaaatgaatttcgccccttggatgaaaggatagatgaatttcaccccaaagcaacaagaactctctttattggcaaccttgaaaaaaccactacttaccatgaccttcgcaacatcttccagcgctttggagaaattgtggatattgacattaagaaagtaaatggagttcctcagtatgcgtttctgcaatactgtgatattgctagcgtttgtaaagctattaagaagatggatggggaatatcttggaaataatcgcctcaagctgggttttggaaagagcatgcctacaaactgcgtgtggctagatgggctttcttcgaatgtgtcagatcagtatttaacacgacatttctgccgatatgggcctgtggtaaaggtggtgtttgaccgcttaaaaggcatggccctggttctctacaatgaaattgaatatgcacaagcagctgtaaaagagaccaaagggaggaaaatcggtgggaataaaattaaggtggattttgcaaatcgggaaagtcagctggctttttatcactgcatggagaaatctggtcaagacatcagagacttttatgaaatgttagccgaaagaagagaggaacgaagggcatcctacgactataaccaagatcgtacatattatgagagtgttcgaactccaggcacttatcctgaggattccaggcgggactatccagctcgagggagagagttttattcagaatgggaaacttaccaaggagactactatgaatcacgatactacgatgatcctcgggaatacagggattacaggaatgatccttatgaacaagatattagggaatatagttacaggcaaagggaacgagaaagagaacgtgaaagatttgagtctgaccgggacagagaccatgagaggaggccgattgaacgaagtcaaagtcctgttcacttgcgacgtccacagagtcctggagcgtctccctctcaggcagagaggttgccgagtgattctgagaggaggctttacagccgatcctcagaccggagtggaagctgtagctcactctcccctccaagatatgagaaactggacaagtctcgtttggagcgctatacaaaaaatgaaaagacagataaagaacgaacttttgatccggagagagtggagagagagagacgcttaatacggaaggaaaaagtggaaaaggacaaaactgacaagcagaaacgcaaaggaaaggttcactcccctagttctcagtcttcagaaacggaccaagaaaatgagcgagagcaaagccctgaaaagcccaggagttgtaataaactgagcagagagaaagctgacaaagagggaatagcgaaaaaccgcctggaactcatgccttgcgtggttttgactcgagtgaaagagaaagagggaaaggtcattgaccacactcctgtggaaaagttgaaagccaagcttgataatgacactgtcaaatcttctgccctggaccagaaacttcaggtctctcagacggagcctgcaaaatctgacttgtctaaactggaatcagttagaatgaaagtaccaaaggaaaaggggctttcaagccatgttgaagtggtggagaaggaaggcaggcttaaagccaggaagcacctcaagcctgagcagcctgcagatggggtaagtgctgtggatctggagaagctggaagccaggaaaaggcgctttgcagattccaatttaaaagcagaaaagcaaaaaccagaggtcaagaaaagcagtccagagatggaggatgctcgcgtgctttcaaaaaagcagcctgacgtgtcctctagagaggtcattctgctgagggaaggagaggctgaaagaaagcctgtgaggaaagaaattcttaaaagagaatctaaaaaaatcaaactggacagacttaatactgttgccagccccaaagactgtcaggagcttgccagtatttctgttgggtctggctcaaggcccagctcagacctacaagcaagactgggagaactagcaggtgaatctgtggaaaatcaagaagtccaatcaaaaaagcccattccctcaaaaccacagctcaaacagctgcaggtattagatgatcaaggaccagagagagaagacgttaggaaaaactattgcagtcttcgtgatgaaacacctgaacgtaaatcaggccaagagaaatcacattcagtaaatactgaagaaaaaattggcattgacatcgatcacacgcagagttaccgaaaacaaatggaacagagtcgtaggaaacagcagatggaaatggaaatagccaagtctgagaagtttggcagtcctaaaaaagatgtagatgaatatgaaagacgtagcctcgttcacgaggtaggcaaaccccctcaagatgtcactgatgactctcctcctagcaaaaagaaaaggatggatcatgtcgattttgatatctgcaccaagcgagaacggaattacagaagttcacgccaaatcagcgaagattctgaaaggactggtggttctcccagtgtccgacatggttccttccatgaagatgaggatcccataggctcccctaggctactgtcagtaaaagggtctcctaaagtagatgaaaaagtcctcccctattctaacataacagtcagggaagagtctttaaaatttaatccttatgattctagcaggagagaacagatggcagatatggccaaaataaaactatctgtcttgaattctgaagatgaactaaatcgttgggactctcagatgaaacaggatgctggcagatttgatgtgagtttcccaaacagcataattaagagagatagccttcgaaaaaggtctgtacgagatctggaacctggtgaggtgccttctgattctgacgaagatggtgaacacaaatcccactcacccagagcctctgcattatatgaaagttctcgattgtcttttttattgagggacagagaagacaagctacgtgagcgagatgaaagactctctagttctttagaaaggaacaaattttactcttttgcattggataagacaatcacaccagacactaaagctttgcttgaaagagctaaatccctctcttcatctcgtgaagaaaattggtcttttcttgattgggactcccgatttgcaaattttcgaaacaacaaagataaagaaaaggttgactctgctccaagacctattccatcctggtacatgaaaaagaagaaaattaggactgattcagaagggaaaatggatgataagaaagaggaccataaagaagaagagcaagagaggcaggaattgtttgcttctcgttttttacacagctcaatctttgaacaagattccaagcgattgcagcatctagagagaaaagaggaagattctgacttcatttctggtaggatctatgggaagcagacatctgagggagcaaacagcacaactgattccattcaagaaccagtagttctgttccatagcagatttatggagctcacacggatgcaacagaaagaaaaagaaaaagaccagaaacccaaagaggttgagaaacaggaagatacagagaatcatcccaagaccccagaatctgctcctgagaataaagattcagaactgaaaactccaccttccgttgggcctccaagtgtcacagtcgtaactctagaatcagccccatcagcactagagaagaccactggtgacaaaacggtagaggcgcctttggtaacagaagagaagactgtggagccagctaccgtctcagaagaagcaaagcctgcatctgaacctgctcctgcccctgtggaacagctggaacaagtagacctgcccccaggagcagaccccgataaagaagctgccatgatgcctgcgggtgttgaggaaggttcatcaggtgaccagccgccttatctggatgccaagcctccaactcccggggcctcgttttcccaggcagagagcaacgtagatccagagcctgacagtacccagccactttcaaaaccagctcagaagtctgaggaagccaatgagccaaaggccgaaaagccagacgccactgcagatgctgagcctgatgcaaaccagaaagccgaagctgctcctgagtctcagcccccagcttctgaagatttagaggttgatcctccagttgctgcaaaggataaaaagccaaacaaaagcaagcgttcaaagacccctgttcaggcagctgcagtgagtatcgtggagaagcccgtcacaaggaagagtgagaggatagaccgggaaaaactcaagcggtccaattctcctcggggagaagcacagaagcttttggaattgaagatggaggcagagaagattacaaggactgcttctaaaaactctgctgcagaccttgaacatcccgaaccaagtttgcctctcagccgaacaaggcgccggaatgtaaggagcgtctatgcaaccatgggtgaccatgaaaaccgctctcctgtcaaagagcccgttgagcaaccaagagtgaccagaaagagattggagcgagagcttcaggaggctgcagcggttcccaccacccctcggaggggaaggcctccaaagacacgccggcgagccgatgaagaggaggagaacgaggccaaggaacctgcagaaacactcaagccacctgagggatggcggtcgccaaggtcccagaaaactgcagctggtggtggaccccaagggaaaaagggaaaaaatgaaccgaaggtggatgctacacgtcctgaggccaccactgaggtgggcccccaaataggcgtgaaagagagctccatggaacccaaggctgctgaggaggaggcagggagtgaacagaaacgtgacagaaaagatgctggcacagacaaaaacccccctgaaaccgcccctgttgaagttgtagagaaaaaaccggcccctgaaaaaaactccaaatcaaagagaggaagatctcgaaactccaggttagcagtggacaaatctgcaagtctgaaaaatgtggatgctgctgtcagtcccaggggggctgcagcacaggcaggggagagggaatctggggtggtggcagtctcccctgagaaaagtgagagtccccaaaaggaggatggtttatcatcccagttgaaaagtgatccagttgatccagacaaggaaccagagaaagaagacgtgtctgcctctgggccgtccccagaagccacccagttagccaagcagatggagctggagcaggccgtggaacacatcgcaaagctcgctgaggcctctgcctctgctgcctataaggcagatgcaccagagggccttgccccagaggacagggacaagcctgcacaccaagcaagtgaaacagagctggctgcggccatcggctccatcatcaatgacatttctggggagccagaaaacttcccagcacctccaccttatcctggagaatcccagacagatctgcaaccccccgcaggtgcacaggcgctgcagccttctgaggaaggaatggagacagatgaggctgtatctggcatcctggaaactgaggctgctacagaatcttctaggcctccagtcaatgctcctgacccctcagccggcccaacagataccaaggaagccagaggaaatagcagtgaaacctcacactcagtgccagaagccaaagggtctaaagaagtggaagtcactcttgttcggaaagacaaagggcgccagaaaacaacccgatcacgccgcaagcgaaacacaaacaagaaagtggtggctcctgtagagagccatgtccctgaatccaaccaagctcaaggtgagagtcctgctgcaaatgaggggacaacagtacagcaccccgaagccccacaggaagaaaagcagagtgagaaaccccattccactcctcctcagtcatgtacttctgacctaagcaagattccctccacagagaattcgtcccaagaaatcagtgttgaggaaaggactccaaccaaagcatctgtgcccccagaccttcccccacctccccagccagcaccggtggatgaggagcctcaagccaggttcagggtgcattccatcattgaaagtgacccggtgaccccacccagcgatccaagcatccccatacccacactgccttctgtaactgcagcaaagctctcacctcctgtcgcctctggggggatcccacaccagagcccccctactaaggtgacagagtggatcacaaggcaggaggagccacgggctcagtctactccatctccagctcttcccccagacacaaaggcctctgatgttgacaccagctccagcaccctgaggaagattctcatggaccccaagtatgtgtctgccacaagtgtcacttccacaagtgtcaccacagccattgcagagcctgtcagtgctgccccttgcctacatgaggccccgcccccgccagttgactctaaaaagcctttagaagaaaaaacagcacctccagtgacaaacaactctgagatacaagcctcggaggtgctggtagctgctgacaaggaaaaggtggctccagtcattgctcccaaaattacctctgttattagccggatgcctgtcagcattgacctggaaaattcacagaagataaccttggcaaaaccagctcctcaaaccctcactggtctggtgagcgcactcactggcctggtgaacgtctccctggtcccggtgaatgccctgaaaggccccgtgaagggctcagtgaccacactgaaaagtttggtgagcacccctgctgggcccgtgaacgtcctgaaagggcctgtgaatgttcttacggggccagtgaatgttctcaccactccagtgaacgccacggtgggcacagtgaatgccgccccaggcacagtcaatgccgctgcgagtgcagtgaatgccacagcaagtgcagtgaccgtcacagcgggtgcggttactgctgcatctggtggtgtaacggccacaacaggcacggtgacaatggcaggggcagtgattgcgccgtcaacaaagtgcaaacagagagcgagtgctaatgaaaacagtcggttccacccagggtccatgcctgtgatcgacgatcgtccggcagacgcgggctcaggggcggggctgcgtgtgaacacttctgaaggggttgtgctcctgagttactcagggcagaagaccgaaggcccacagcggatcagcgccaagatcagccagatccccccggccagtgcaatggacattgaatttcagcagtcagtgtccaagtcccaggtcaaacctgattctgtcacagcatcgcagcctccatccaaaggccctcaagctcctgcaggctatgcgaacgtggccacccattccacgttggtactgaccgcccagacatataatgcctctcctgtgatttcgtctgtgaaggccgataggccatccttggagaagcccgagcccattcacctctcggtgtccacgcctgtcacccagggaggcacagtgaaggttctcacccaggggatcaacacaccccctgtgctggttcacaaccagctggtcctcaccccaagcattgtcaccacaaacaagaagcttgctgaccccgtcacccttaaaatcgagaccaaggtccttcagccggccaacctggggtccacgctcacgccccaccaccctcctgctctgcccagcaaactgcctacagaagtcaaccatgtcccctcggggcccagcatcccagcagatcgaactgtctcccatttggcagctgcaaagctagatgctcattctcctcgaccaagtggacccgggccatcctcattcccaagggcaagccaccccagcagtactgcatctacggcgctctccaccaacgccacagtcatgctggctgcaggcatcccagtgccccagttcatctccagcatccacccagagcagtctgtcatcatgccaccccacagcatcacccagactgtgtccctgagccacctctcccagggcgaggtgagaatgaacactcccacgctgcccagtatcacctacagcatccggccagaagcgcttcactctcctcgggctccgctgcagccccagcaaatagaggtcagggccccacagcgtgccagcaccccgcagccagccccagctggtgtgcctgcactggcctcccagcaccctcccgaggaggaagtgcattatcaccttcctgtcgctcgagccacagcccctgtgcagtcagaggtactagtcatgcagtctgagtaccgactgcacccctatactgtgccacgggatgtgaggatcatggtgcatccacatgtgacggcagtcagcgagcagcccagggccgcggatggggtggtgaaggtgccaccagccagcaaggcccctcagcagccagggaaggaagctgccaagacaccagatgccaaagctgcccccacccccacccctgcccccgtccctgtccctgtcccccttcctgcccctgctcctgcccctcatggtgaggcccgtatcctcacagttacccccagtaaccaactccaggggctgcctctgacccctcctgtggtggtgacccatggggtgcagattgtgcactccagcggggagctgtttcaagagtaccggtacggcgacatccgcacctaccaccccccggcccagctcacacacactcagtttcccgccgcttcctctgttggcctgccttcccggaccaagacagctgctcagggccctcctcctgaaggtgagcccctgcagcctcctcagcctgtgcagtccacacagcctgcccagcctgcaccaccctgcccgccctcccagctcggtcagcccggccagccaccaagcagcaagatgcctcaagtgtcccaggaggcaaaggggacccagacgggagtagagcagcctcgcctcccagctggacctgcaaacaggccacctgagcctcacacccaggttcagagggcacaagcagaaacaggcccgacttccttcccctcccctgtgtctgtctccatgaagcctgaccttccagtctctcttcccactcagactgccccaaaacagccgttgtttgtcccaacaacctctggccccagcaccccaccaggactggttctgccacacactgaattccagccagcccccaaacaagattcctctccacacctgacttcccagagacccgtggatatggttcaacttctgaagaagtaccccatcgtgtggcagggcctgctggccctcaagaatgacacagctgctgtgcagctccacttcgtctctggcaacaacgtcctggcccatcggtccctgcccctttctgaaggagggcccccactaaggatcgcccagaggatgcggctggaggcaacgcagctggaaggggttgcccgaaggatgacggtggagacagattactgtctgctgctggctctgccctgtggccgtgaccaagaggatgttgtgagccagaccgagtccctcaaggctgccttcatcacttacctgcaggccaagcaggcggcagggatcatcaacgttcccaaccctggctccaatcagcctgcctacgtgctgcagatcttcccgccctgtgagttctctgagagtcacctgtcccgcctggcccctgacctccttgccagcatctccaacatctctccccacctcatgattgtcattgcctccgtgtgagccactgagtggttatcacctcagtgaatcttcccagggctctgcagtaaaaacaaaggacaacccagccaagcagaggaagaagctgccgaaggggacagactccactgccagacggccagccgtttgctgtcctgccgcccggctcagtcggccagacttcctctaggagtggtgctgctaccttgtatgtttacataatgctttagcccaaggacacatcaccaacccatggactcgcagacaccggggctgggtttctctttcctctttttggagaaaaggaacagggcagtggaatgaaaattttttgtttgtttgtttttaagaaacaagaaaacagaactgcctttgcactaaattagtgacttggacttttgcccagtgaagacaggctgtgacactctggatgtcttggtgtgtgtagacacacattgcagactcttaacgcaggaaggacttcaaacttctgctgagaccttggggtcaaggaacatttcattggttttttttgtccacccccatctcccttgctcatttggatgcgtcaccttaattctcctgctgccaccgtctttgattcaccgggatgtacagtttacagttgaagagcaaacagaaaggttttctcttggtgggatatgcagaacttgggatgtgtgtatatataaatatataatatatataaatatatataatactgacttaaaaaatcaaatcccccgacatacgttttttttaatctgtgccaaaaatgtgttttcagaggaaatcttattttcatattcagactttgtattgcccactcatttgtataagtgcgcttcggtacagcacgggtcctgctcccgcgatgtggaagtgtcacacggcacctgtacaaaaagactggctaacccctcttcctattaccttgatctcttcccccaacttcctaacacttattaatttatgaaactgtttttctcagcgcagttttgttttgtgtgtccattggattacaaactttattaaaaaatataaaacac

SEQ ID NO: 167 - protein, 3664 aa, Homo sapiens
MVRETRHLWVGNLPENVREEKIIEHFKRYGRVESVKILPKRGSEGGVAAFVDFVDIKSAQKAHNSVNKMGDRDLRTDYNEPGTIPSAARGLDDTVSIASRSREVSGFRGGGGGPAYGPPPSLHAREGRYERRLDGASDNRERAYEHSAYGHHERGTGGFDRTRHYDQDYYRDPRERTLQHGLYYASRSRSPNRFDAHDPRYEPRAREQFTLPSVVHRDIYRDDITREVRGRRPERNYQHSRSRSPHSSQSRNQSPQRLASQASRPTRSPSGSGSRSRSSSSDSISSSSSTSSDSSDSSSSSSDDSPARSVQSAAVPAPTSQLLSSLEKDEPRKSFGIKVQNLPVRSTDTSLKDGLFHEFKKFGKVTSVQIHGTSEERYGLVFFRQQEDQEKALTASKGKLFFGMQIEVTAWIGPETESENEFRPLDERIDEFHPKATRTLFIGNLEKTTTYHDLRNIFQRFGEIVDIDIKKVNGVPQYAFLQYCDIASVCKAIKKMDGEYLGNNRLKLGFGKSMPTNCVWLDGLSSNVSDQYLTRHFCRYGPVVKVVFDRLKGMALVLYNEIEYAQAAVKETKGRKIGGNKIKVDFANRESQLAFYHCMEKSGQDIRDFYEMLAERREERRASYDYNQDRTYYESVRTPGTYPEDSRRDYPARGREFYSEWETYQGDYYESRYYDDPREYRDYRNDPYEQDIREYSYRQRERERERERFESDRDRDHERRPIERSQSPVHLRRPQSPGASPSQAERLPSDSERRLYSRSSDRSGSCSSLSPPRYEKLDKSRLERYTKNEKTDKERTFDPERVERERRLIRKEKVEKDKTDKQKRKGKVHSPSSQSSETDQENEREQSPEKPRSCNKLSREKADKEGIAKNRLELMPCVVLTRVKEKEGKVIDHTPVEKLKAKLDNDTVKSSALDQKLQVSQTEPAKSDLSKLESVRMKVPKEKGLSSHVEVVEKEGRLKARKHLKPEQPADGVSAVDLEKLEARKRRFADSNLKAEKQKPEVKKSSPEMEDARVLSKKQPDVSSREVILLREGEAERKPVRKEILKRESKKIKLDRLNTVASPKDCQELASISVGSGSRPSSDLQARLGELAGESVENQEVQSKKPIPSKPQLKQLQVLDDQGPEREDVRKNYCSLRDETPERKSGQEKSHSVNTEEKIGIDIDHTQSYRKQMEQSRRKQQMEMEIAKSEKFGSPKKDVDEYERRSLVHEVGKPPQDVTDDSPPSKKKRMDHVDFDICTKRERNYRSSRQISEDSERTGGSPSVRHGSFHEDEDPIGSPRLLSVKGSPKVDEKVLPYSNITVREESLKFNPYDSSRREQMADMAKIKLSVLNSEDELNRWDSQMKQDAGRFDVSFPNSIIKRDSLRKRSVRDLEPGEVPSDSDEDGEHKSHSPRASALYESSRLSFLLRDREDKLRERDERLSSSLERNKFYSFALDKTITPDTKALLERAKSLSSSREENWSFLDWDSRFANFRNNKDKEKVDSAPRPIPSWYMKKKKIRTDSEGKMDDKKEDHKEEEQERQELFASRFLHSSIFEQDSKRLQHLERKEEDSDFISGRIYGKQTSEGANSTTDSIQEPVVLFHSRFMELTRMQQKEKEKDQKPKEVEKQEDTENHPKTPESAPENKDSELKTPPSVGPPSVTVVTLESAPSALEKTTGDKTVEAPLVTEEKTVEPATVSEEAKPASEPAPAPVEQLEQVDLPPGADPDKEAAMMPAGVEEGSSGDQPPYLDAKPPTPGASFSQAESNVDPEPDSTQPLSKPAQKSEEANEPKAEKPDATADAEPDANQKAEAAPESQPPASEDLEVDPPVAAKDKKPNKSKRSKTPVQAAAVSIVEKPVTRKSERIDREKLKRSNSPRGEAQKLLELKMEAEKITRTASKNSAADLEHPEPSLPLSRTRRRNVRSVYATMGDHENRSPVKEPVEQPRVTRKRLERELQEAAAVPTTPRRGRPPKTRRRADEEEENEAKEPAETLKPPEGWRSPRSQKTAAGGGPQGKKGKNEPKVDATRPEATTEVGPQIGVKESSMEPKAAEEEAGSEQKRDRKDAGTDKNPPETAPVEVVEKKPAPEKNSKSKRGRSRNSRLAVDKSASLKNVDAAVSPRGAAAQAGERESGVVAVSPEKSESPQKEDGLSSQLKSDPVDPDKEPEKEDVSASGPSPEATQLAKQMELEQAVEHIAKLAEASASAAYKADAPEGLAPEDRDKPAHQASETELAAAIGSIINDISGEPENFPAPPPYPGESQTDLQPPAGAQALQPSEEGMETDEAVSGILETEAATESSRPPVNAPDPSAGPTDTKEARGNSSETSHSVPEAKGSKEVEVTLVRKDKGRQKTTRSRRKRNTNKKVVAPVESHVPESNQAQGESPAANEGTTVQHPEAPQEEKQSEKPHSTPPQSCTSDLSKIPSTENSSQEISVEERTPTKASVPPDLPPPPQPAPVDEEPQARFRVHSIIESDPVTPPSDPSIPIPTLPSVTAAKLSPPVASGGIPHQSPPTKVTEWITRQEEPRAQSTPSPALPPDTKASDVDTSSSTLRKILMDPKYVSATSVTSTSVTTAIAEPVSAAPCLHEAPPPPVDSKKPLEEKTAPPVTNNSEIQASEVLVAADKEKVAPVIAPKITSVISRMPVSIDLENSQKITLAKPAPQTLTGLVSALTGLVNVSLVPVNALKGPVKGSVTTLKSLVSTPAGPVNVLKGPVNVLTGPVNVLTTPVNATVGTVNAAPGTVNAAASAVNATASAVTVTAGAVTAASGGVTATTGTVTMAGAVIAPSTKCKQRASANENSRFHPGSMPVIDDRPADAGSGAGLRVNTSEGVVLLSYSGQKTEGPQRISAKISQIPPASAMDIEFQQSVSKSQVKPDSVTASQPPSKGPQAPAGYANVATHSTLVLTAQTYNASPVISSVKADRPSLEKPEPIHLSVSTPVTQGGTVKVLTQGINTPPVLVHNQLVLTPSIVTTNKKLADPVTLKIETKVLQPANLGSTLTPHHPPALPSKLPTEVNHVPSGPSIPADRTVSHLAAAKLDAHSPRPSGPGPSSFPRASHPSSTASTALSTNATVMLAAGIPVPQFISSIHPEQSVIMPPHSITQTVSLSHLSQGEVRMNTPTLPSITYSIRPEALHSPRAPLQPQQIEVRAPQRASTPQPAPAGVPALASQHPPEEEVHYHLPVARATAPVQSEVLVMQSEYRLHPYTVPRDVRIMVHPHVTAVSEQPRAADGVVKVPPASKAPQQPGKEAAKTPDAKAAPTPTPAPVPVPVPLPAPAPAPHGEARILTVTPSNQLQGLPLTPPVVVTHGVQIVHSSGELFQEYRYGDIRTYHPPAQLTHTQFPAASSVGLPSRTKTAAQGPPPEGEPLQPPQPVQSTQPAQPAPPCPPSQLGQPGQPPSSKMPQVSQEAKGTQTGVEQPRLPAGPANRPPEPHTQVQRAQAETGPTSFPSPVSVSMKPDLPVSLPTQTAPKQPLFVPTTSGPSTPPGLVLPHTEFQPAPKQDSSPHLTSQRPVDMVQLLKKYPIVWQGLLALKNDTAAVQLHFVSGNNVLAHRSLPLSEGGPPLRIAQRMRLEATQLEGVARRMTVETDYCLLLALPCGRDQEDVVSQTESLKAAFITYLQAKQAAGIINVPNPGSNQPAYVLQIFPPCEFSESHLSRLAPDLLASISNISPHLMIVIASV

SEQ ID NO: 168 - DNA, 14982 bp, Homo sapiens
ctgcttcacttcacggggcgaacatggcgcacagctgtcggtggcgcttccccgcccgacccgggaccaccgggggcggcggcggcggggggcgccggggcctagggggcgccccgcggcaacgcgtcccggccctgctgcttccccccgggcccccggtcggcggtggcggccccggggcgcccccctcccccccggctgtggcggccgcggcggcggcggcgggaagcagcggggctggggttccagggggagcggccgccgcctcagcagcctcctcgtcgtccgcctcgtcttcgtcttcgtcatcgtcctcagcctcttcagggccggccctgctccgggtgggcccgggcttcgacgcggcgctgcaggtctcggccgccatcggcaccaacctgcgccggttccgggccgtgtttggggagagcggcgggggaggcggcagcggagaggatgagcaattcttaggttttggctcagatgaagaagtcagagtgcgaagtcccacaaggtctccttcagttaaaactagtcctcgaaaacctcgtgggagacctagaagtggctctgaccgaaattcagctatcctctcagatccatctgtgttttcccctctaaataaatcagagaccaaatctggagataagatcaagaagaaagattctaaaagtatagaaaagaagagaggaagacctcccaccttccctggagtaaaaatcaaaataacacatggaaaggacatttcagagttaccaaagggaaacaaagaagatagcctgaaaaaaattaaaaggacaccttctgctacgtttcagcaagccacaaagattaaaaaattaagagcaggtaaactctctcctctcaagtctaagtttaagacagggaagcttcaaataggaaggaagggggtacaaattgtacgacggagaggaaggcctccatcaacagaaaggataaagaccccttcgggtctcctcattaattctgaactggaaaagccccagaaagtccggaaagacaaggaaggaacacctccacttacaaaagaagataagacagttgtcagacaaagccctcgaaggattaagccagttaggattattccttcttcaaaaaggacagatgcaaccattgctaagcaactcttacagagggcaaaaaagggggctcaaaagaaaattgaaaaagaagcagctcagctgcagggaagaaaggtgaagacacaggtcaaaaatattcgacagttcatcatgcctgttgtcagtgctatctcctcgcggatcattaagacccctcggcggtttatagaggatgaggattatgaccctccaattaaaattgcccgattagagtctacaccgaatagtagattcagtgccccgtcctgtggatcttctgaaaaatcaagtgcagcttctcagcactcctctcaaatgtcttcagactcctctcgatctagtagccccagtgttgatacctccacagactctcaggcttctgaggagattcaggtacttcctgaggagcggagcgatacccctgaagttcatcctccactgcccatttcccagtccccagaaaatgagagtaatgataggagaagcagaaggtattcagtgtcggagagaagttttggatctagaacgacgaaaaaattatcaactctacaaagtgccccccagcagcagacctcctcgtctccacctccacctctgctgactccaccgccaccactgcagccagcctccagtatctctgaccacacaccttggcttatgcctccaacaatccccttagcatcaccatttttgcctgcttccactgctcctatgcaagggaagcgaaaatctattttgcgagaaccgacatttaggtggacttctttaaagcattctaggtcagagccacaatacttttcctcagcaaagtatgccaaagaaggtcttattcgcaaaccaatatttgataatttccgaccccctccactaactcccgaggacgttggctttgcatctggtttttctgcatctggtaccgctgcttcagcccgattgttttcgccactccattctggaacaaggtttgatatgcacaaaaggagccctcttctgagagctccaagatttactccaagtgaggctcactctagaatatttgagtctgtaaccttgcctagtaatcgaacttctgctggaacatcttcttcaggagtatccaatagaaaaaggaaaagaaaagtgtttagtcctattcgatctgaaccaagatctccttctcactccatgaggacaagaagtggaaggcttagtagttctgagctctcacctctcacccccccgtcttctgtctcttcctcgttaagcatttctgttagtcctcttgccactagtgccttaaacccaacttttacttttccttctcattccctgactcagtctggggaatctgcagagaaaaatcagagaccaaggaagcagactagtgctccggcagagccattttcatcaagtagtcctactcctctcttcccttggtttaccccaggctctcagactgaaagagggagaaataaagacaaggcccccgaggagctgtccaaagatcgagatgctgacaagagcgtggagaaggacaagagtagagagagagaccgggagagagaaaaggagaataagcgggagtcaaggaaagagaaaaggaaaaagggatcagaaattcagagtagttctgctttgtatcctgtgggtagggtttccaaagagaaggttgttggtgaagatgttgccacttcatcttctgccaaaaaagcaacagggcggaagaagtcttcatcacatgattctgggactgatattacttctgtgactcttggggatacaacagctgtcaaaaccaaaatacttataaagaaagggagaggaaatctggaaaaaaccaacttggacctcggcccaactgccccatccctggagaaggagaaaaccctctgcctttccactccttcatctagcactgttaaacattccacttcctccataggctccatgttggctcaggcagacaagcttccaatgactgacaagagggttgccagcctcctaaaaaaggccaaagctcagctctgcaagattgagaagagtaagagtcttaaacaaaccgaccagcccaaagcacagggtcaagaaagtgactcatcagagacctctgtgcgaggaccccggattaaacatgtctgcagaagagcagctgttgcccttggccgaaaacgagctgtgtttcctgatgacatgcccaccctgagtgccttaccatgggaagaacgagaaaagattttgtcttccatggggaatgatgacaagtcatcaattgctggctcagaagatgctgaacctcttgctccacccatcaaaccaattaaacctgtcactagaaacaaggcaccccaggaacctccagtaaagaaaggacgtcgatcgaggcggtgtgggcagtgtcccggctgccaggtgcctgaggactgtggtgtttgtactaattgcttagataagcccaagtttggtggtcgcaatataaagaagcagtgctgcaagatgagaaaatgtcagaatctacaatggatgccttccaaagcctacctgcagaagcaagctaaagctgtgaaaaagaaagagaaaaagtctaagaccagtgaaaagaaagacagcaaagagagcagtgttgtgaagaacgtggtggactctagtcagaaacctaccccatcagcaagagaggatcctgccccaaagaaaagcagtagtgagcctcctccacgaaagcccgtcgaggaaaagagtgaagaagggaatgtctcggcccctgggcctgaatccaaacaggccaccactccagcttccaggaagtcaagcaagcaggtctcccagccagcactggtcatcccgcctcagccacctactacaggaccgccaagaaaagaagttcccaaaaccactcctagtgagcccaagaaaaagcagcctccaccaccagaatcaggtccagagcagagcaaacagaaaaaagtggctccccgcccaagtatccctgtaaaacaaaaaccaaaagaaaaggaaaaaccacctccggtcaataagcaggagaatgcaggcactttgaacatcctcagcactctctccaatggcaatagttctaagcaaaaaattccagcagatggagtccacaggatcagagtggactttaaggaggattgtgaagcagaaaatgtgtgggagatgggaggcttaggaatcttgacttctgttcctataacacccagggtggtttgctttctctgtgccagtagtgggcatgtagagtttgtgtattgccaagtctgttgtgagcccttccacaagttttgtttagaggagaacgagcgccctctggaggaccagctggaaaattggtgttgtcgtcgttgcaaattctgtcacgtttgtggaaggcaacatcaggctacaaagcagctgctggagtgtaataagtgccgaaacagctatcaccctgagtgcctgggaccaaactaccccaccaaacccacaaagaagaagaaagtctggatctgtaccaagtgtgttcgctgtaagagctgtggatccacaactccaggcaaagggtgggatgcacagtggtctcatgatttctcactgtgtcatgattgcgccaagctctttgctaaaggaaacttctgccctctctgtgacaaatgttatgatgatgatgactatgagagtaagatgatgcaatgtggaaagtgtgatcgctgggtccattccaaatgtgagaatctttcagatgagatgtatgagattctatctaatctgccagaaagtgtggcctacacttgtgtgaactgtactgagcggcaccctgcagagtggcgactggcccttgaaaaagagctgcagatttctctgaagcaagttctgacagctttgttgaattctcggactaccagccatttgctacgctaccggcaggctgccaagcctccagacttaaatcccgagacagaggagagtataccttcccgcagctcccccgaaggacctgatccaccagttcttactgaggtcagcaaacaggatgatcagcagcctttagatctagaaggagtcaagaggaagatggaccaagggaattacacatctgtgttggagttcagtgatgatattgtgaagatcattcaagcagccattaattcagatggaggacagccagaaattaaaaaagccaacagcatggtcaagtccttcttcattcggcaaatggaacgtgtttttccatggttcagtgtcaaaaagtccaggttttgggagccaaataaagtatcaagcaacagtgggatgttaccaaacgcagtgcttccaccttcacttgaccataattatgctcagtggcaggagcgagaggaaaacagccacactgagcagcctcctttaatgaagaaaatcattccagctcccaaacccaaaggtcctggagaaccagactcaccaactcctctgcatcctcctacaccaccaattttgagtactgataggagtcgagaagacagtccagagctgaacccacccccaggcatagaagacaatagacagtgtgcgttatgtttgacttatggtgatgacagtgctaatgatgctggtcgtttactatatattggccaaaatgagtggacacatgtaaattgtgctttgtggtcagcggaagtgtttgaagatgatgacggatcactaaagaatgtgcatatggctgtgatcaggggcaagcagctgagatgtgaattctgccaaaagccaggagccaccgtgggttgctgtctcacatcctgcaccagcaactatcacttcatgtgttcccgagccaagaactgtgtctttctggatgataaaaaagtatattgccaacgacatcgggatttgatcaaaggcgaagtggttcctgagaatggatttgaagttttcagaagagtgtttgtggactttgaaggaatcagcttgagaaggaagtttctcaatggcttggaaccagaaaatatccacatgatgattgggtctatgacaatcgactgcttaggaattctaaatgatctctccgactgtgaagataagctctttcctattggatatcagtgttccagggtatactggagcaccacagatgctcgcaagcgctgtgtatatacatgcaagatagtggagtgccgtcctccagtcgtagagccggatatcaacagcactgttgaacatgatgaaaacaggaccattgcccatagtccaacatcttttacagaaagttcatcaaaagagagtcaaaacacagctgaaattataagtcctccatcaccagaccgacctcctcattcacaaacctctggctcctgttattatcatgtcatctcaaaggtccccaggattcgaacacccagttattctccaacacagagatcccctggctgtcgaccgttgccttctgcaggaagtcctaccccaaccactcatgaaatagtcacagtaggtgatcctttactctcctctggacttcgaagcattggctccaggcgtcacagtacctcttccttatcaccccagcggtccaaactccggataatgtctccaatgagaactgggaatacttactctaggaataatgtttcctcagtctccaccaccgggaccgctactgatcttgaatcaagtgccaaagtagttgatcatgtcttagggccactgaattcaagtactagtttagggcaaaacacttccacctcttcaaatttgcaaaggacagtggttactgtaggcaataaaaacagtcacttggatggatcttcatcttcagaaatgaagcagtccagtgcttcagacttggtgtccaagagctcctctttaaagggagagaagaccaaagtgctgagttccaagagctcagagggatctgcacataatgtggcttaccctggaattcctaaactggccccacaggttcataacacaacatctagagaactgaatgttagtaaaatcggctcctttgctgaaccctcttcagtgtcgttttcttctaaagaggccctctccttcccacacctccatttgagagggcaaaggaatgatcgagaccaacacacagattctacccaatcagcaaactcctctccagatgaagatactgaagtcaaaaccttgaagctatctggaatgagcaacagatcatccattatcaacgaacatatgggatctagttccagagataggagacagaaagggaaaaaatcctgtaaagaaactttcaaagaaaagcattccagtaaatcttttttggaacctggtcaggtgacaactggtgaggaaggaaacttgaagccagagtttatggatgaggttttgactcctgagtatatgggccaacgaccatgtaacaatgtttcttctgataagattggtgataaaggcctttctatgccaggagtccccaaagctccacccatgcaagtagaaggatctgccaaggaattacaggcaccacggaaacgcacagtcaaagtgacactgacacctctaaaaatggaaaatgagagtcaatccaaaaatgccctgaaagaaagtagtcctgcttcccctttgcaaatagagtcaacatctcccacagaaccaatttcagcctctgaaaatccaggagatggtccagtggcccaaccaagccccaataatacctcatgccaggattctcaaagtaacaactatcagaatcttccagtacaggacagaaacctaatgcttccagatggccccaaacctcaggaggatggctcttttaaaaggaggtatccccgtcgcagtgcccgtgcacgttctaacatgttttttgggcttaccccactctatggagtaagatcctatggtgaagaagacattccattctacagcagctcaactgggaagaagcgaggcaagagatcagctgaaggacaggtggatggggccgatgacttaagcacttcagatgaagacgacttatactattacaacttcactagaacagtgatttcttcaggtggagaggaacgactggcatcccataatttatttcgggaggaggaacagtgtgatcttccaaaaatctcacagttggatggtgttgatgatgggacagagagtgatactagtgtcacagccacaacaaggaaaagcagccagattccaaaaagaaatggtaaagaaaatggaacagagaacttaaagattgatagacctgaagatgctggggagaaagaacatgtcactaagagttctgttggccacaaaaatgagccaaagatggataactgccattctgtaagcagagttaaaacacagggacaagattccttggaagctcagctcagctcattggagtcaagccgcagagtccacacaagtaccccctccgacaaaaatttactggacacctataatactgagctcctgaaatcagattcagacaataacaacagtgatgactgtgggaatatcctgccttcagacattatggactttgtactaaagaatactccatccatgcaggctttgggtgagagcccagagtcatcttcatcagaactcctgaatcttggtgaaggattgggtcttgacagtaatcgtgaaaaagacatgggtctttttgaagtattttctcagcagctgcctacaacagaacctgtggatagtagtgtctcttcctctatctcagcagaggaacagtttgagttgcctctagagctaccatctgatctgtctgtcttgaccacccggagtcccactgtccccagccagaatcccagtagactagctgttatctcagactcaggggagaagagagtaaccatcacagaaaaatctgtagcctcctctgaaagtgacccagcactgctgagcccaggagtagatccaactcctgaaggccacatgactcctgatcattttatccaaggacacatggatgcagaccacatctctagccctccttgtggttcagtagagcaaggtcatggcaacaatcaggatttaactaggaacagtagcacccctggccttcaggtacctgtttccccaactgttcccatccagaaccagaagtatgtgcccaattctactgatagtcctggcccgtctcagatttccaatgcagctgtccagaccactccaccccacctgaagccagccactgagaaactcatagttgttaaccagaacatgcagccactttatgttctccaaactcttccaaatggagtgacccaaaaaatccaattgacctcttctgttagttctacacccagtgtgatggagacaaatacttcagtattgggacccatgggaggtggtctcacccttaccacaggactaaatccaagcttgccaacttctcaatctttgttcccttctgctagcaaaggattgctacccatgtctcatcaccagcacttacattccttccctgcagctactcaaagtagtttcccaccaaacatcagcaatcctccttcaggcctgcttattggggttcagcctcctccggatccccaacttttggtttcagaatccagccagaggacagacctcagtaccacagtagccactccatcctctggactcaagaaaagacccatatctcgtctacagacccgaaagaataaaaaacttgctccctctagtaccccttcaaacattgccccttctgatgtggtttctaatatgacattgattaacttcacaccctcccagcttcctaatcatccaagtctgttagatttggggtcacttaatacttcatctcaccgaactgtccccaacatcataaaaagatctaaatctagcatcatgtattttgaaccggcacccctgttaccacagagtgtgggaggaactgctgccacagcggcaggcacatcaacaataagccaggatactagccacctcacatcagggtctgtgtctggcttggcatccagttcctctgtcttgaatgttgtatccatgcaaactaccacaacccctacaagtagtgcgtcagttccaggacacgtcaccttaaccaacccaaggttgcttggtaccccagatattggctcaataagcaatcttttaatcaaagctagccagcagagcctggggattcaggaccagcctgtggctttaccgccaagttcaggaatgtttccacaactggggacatcacagaccccctctactgctgcaataacagcggcatctagcatctgtgtgctcccctccactcagactacgggcataacagccgcttcaccttctggggaagcagacgaacactatcagcttcagcatgtgaaccagctccttgccagcaaaactgggattcattcttcccagcgtgatcttgattctgcttcagggccccaggtatccaactttacccagacggtagacgctcctaatagcatgggactggagcagaacaaggctttatcctcagctgtgcaagccagccccacctctcctgggggttctccatcctctccatcttctggacagcggtcagcaagcccttcagtgccgggtcccactaaacccaaaccaaaaaccaaacggtttcagctgcctctagacaaagggaatggcaagaagcacaaagtttcccatttgcggaccagttcttctgaagcacacattccagaccaagaaacgacatccctgacctcaggcacagggactccaggagcagaggctgagcagcaggatacagctagcgtggagcagtcctcccagaaggagtgtgggcaacctgcagggcaagtcgctgttcttccggaagttcaggtgacccaaaatccagcaaatgaacaagaaagtgcagaacctaaaacagtggaagaagaggaaagtaatttcagctccccactgatgctttggcttcagcaagaacaaaagcggaaggaaagcattactgagaaaaaacccaagaaaggacttgtttttgaaatttccagtgatgatggctttcagatctgtgcagaaagtattgaagatgcctggaagtcattgacagataaagtccaggaagctcgatcaaatgcccgcctaaagcagctctcatttgcaggtgttaacggtttgaggatgctggggattctccatgatgcagttgtgttcctcattgagcagctgtctggtgccaagcactgtcgaaattacaaattccgtttccacaagccagaggaggccaatgaaccccccttgaaccctcacggctcagccagggctgaagtccacctcaggaagtcagcatttgacatgtttaacttcctggcttctaaacatcgtcagcctcctgaatacaaccccaatgatgaagaagaggaggaggtacagctgaagtcagctcggagggcaactagcatggatctgccaatgcccatgcgcttccggcacttaaaaaagacttctaaggaggcagttggtgtctacaggtctcccatccatggccggggtcttttctgtaagagaaacattgatgcaggtgagatggtgattgagtatgccggcaacgtcatccgctccatccagactgacaagcgggaaaagtattacgacagcaagggcattggttgctatatgttccgaattgatgactcagaggtagtggatgccaccatgcatggaaatgctgcacgcttcatcaatcactcgtgtgagcctaactgctattctcgggtcatcaatattgatgggcagaagcacattgtcatctttgccatgcgtaagatctaccgaggagaggaactcacttacgactataagttccccattgaggatgccagcaacaagctgccctgcaactgtggcgccaagaaatgccggaagttcctaaactaaagctgctcttctcccccagtgttggagtgcaaggaggcggggccatccaaagcaacgctgaaggccttttccagcagctgggagctcccggattgcgtggcacagctgaggggcctctgtgatggctgagctctcttatgtcctatactcacatcagacatgtgatcatagtcccagagacagagttgaggtctcgaagaaaagatccatgatcggctttctcctggggcccctccaattgtttactgttagaaagtgggaatggggtccctagcagacttgcctggaaggagcctattatagagggttggttatgttgggagattgggcctgaatttctccacagaaataagttgccatcctcaggttggccctttcccaagcactgtaagtgagtgggtcaggcaaagccccaaatggagggttggttagattcctgacagtttgccagccaggccccacctacagcgtctgtcgaacaaacagaggtctggtggttttccctactatcctcccactcgagagttcacttctggttgggagacaggattcctagcacctccggtgtcaaaaggctgtcatggggttgtgccaattaattaccaaacattgagcctgcaggctttgagtgggagtgttgcccccaggagccttatctcagccaattacctttcttgacagtaggagcggcttccctctcccattccctcttcactcccttttcttcctttcccctgtcttcatgccactgctttcccatgcttctttcgggttgtaggggagactgactgcctgctcaaggacactccctgctgggcataggatgtgcctgcaaaaagttccctgagcctgtaagcactccaggtggggaagtggacaggagccattggtcataaccagacagaatttggaaacattttcataaagctccatggagagttttaaagaaacatatgtagcatgattttgtaggagaggaaaaagattatttaaataggatttaaatcatgcaacaacgagagtatcacagccaggatgacccttgggtcccattcctaagacatggttactttattttccccttgttaagacataggaagacttaatttttaaacggtcagtgtccagttgaaggcagaacactaatcagatttcaaggcccacaacttggggactagaccaccttatgttgagggaactctgccacctgcgtgcaacccacagctaaagtaaattcaatgacactactgccctgattactccttaggatgtggtcaaaacagcatcaaatgtttcttctcttcctttccccaagacagagtcctgaacctgttaaattaagtcattggattttactctgttctgtttacagtttactatttaaggttttataaatgtaaatatattttgtatatttttctatgagaagcacttcatagggagaagcacttatgacaaggctattttttaaaccgcggtattatcctaatttaaaagaagatcggtttttaataattttttattttcataggatgaagttagagaaaatattcagctgtacacacaaagtctggtttttcctgcccaacttccccctggaaggtgtactttttgttgtttaatgtgtagcttgtttgtgccctgttgacataaatgtttcctgggtttgctctttgacaataaatggagaaggaaggtcacccaactccattgggccactcccctccttcccctattgaagctcctcaaaaggctacagtaatatcttgatacaacagattctcttctttcccgcctctctcctttccggcgcaacttccagagtggtgggagacggcaatctttacatttccctcatctttcttacttcagagttagcaaacaacaagttgaatggcaacttgacatttttgcatcaccatctgcctcataggccactctttcctttccctctgcccaccaagtcctcatatctgcagagaacccattgatcaccttgtgccctcttttggggcagcctgttgaaactgaagcacagtctgaccactcacgataaagcagatttttctctgcctctgccacaaggtttcagagtagtgtagtccaagtagagggtggggcacccttttctcgccgcaagaagcccattcctatggaagtctagcaaagcaatacgactcagcccagcactctctgccccaggactcatggctctgctgtgccttccatcctgggctcccttctctcctgtgaccttaagaactttgtctggtggctttgctggaacattgtcactgttttcactgtcatgcagggagcccagcactgtggccaggatggcagagacttccttgtcatcatggagaagtgccagcaggggactgggaaaagcactctacccagacctcacctcccttcctccttttgcccatgaacaagatgcagtggccctaggggttccactagtgtctgctttcctttattattgcactgtgtgaggtttttttgtaaatccttgtattcctattttttttaaagaaaaaaaaaaaaccttaagctgcatttgttactgaaatgattaatgcactgatgggtcctgaattcaccttgagaaagacccaaaggccagtcagggggtggggggaactcagctaaatagacctagttactgccctgctaggccatgctgtactgtgagcccctcctcactctctaccaaccctaaaccctgaggacaggggaggaacccacagcttccttctcctgccagctgcagatggtttgccttgcctttccaccccctaattgtcaaccacaaaaatgagaaattcctcttctagctcagccttgagtccattgccaaattttcagcacacctgccagcaacttgggggaataagcgaaggtttccctacaagagggaaagaaggcaaaaacggcacagctatctccaaacacatctgagttcatttcaaaagtgaccaagggaatctccgcacaaaagtgcagattgaggaattgtgatgggtcattcccaagaatcccccaa

SEQ ID NO: 169 - protein, 3969 aa, Homo sapiens
MAHSCRWRFPARPGTTGGGGGGGRRGLGGAPRQRVPALLLPPGPPVGGGGPGAPPSPPAVAAAAAAAGSSGAGVPGGAAAASAASSSSASSSSSSSSSASSGPALLRVGPGFDAALQVSAAIGTNLRRFRAVFGESGGGGGSGEDEQFLGFGSDEEVRVRSPTRSPSVKTSPRKPRGRPRSGSDRNSAILSDPSVFSPLNKSETKSGDKIKKKDSKSIEKKRGRPPTFPGVKIKITHGKDISELPKGNKEDSLKKIKRTPSATFQQATKIKKLRAGKLSPLKSKFKTGKLQIGRKGVQIVRRRGRPPSTERIKTPSGLLINSELEKPQKVRKDKEGTPPLTKEDKTVVRQSPRRIKPVRIIPSSKRTDATIAKQLLQRAKKGAQKKIEKEAAQLQGRKVKTQVKNIRQFIMPVVSAISSRIIKTPRRFIEDEDYDPPIKIARLESTPNSRFSAPSCGSSEKSSAASQHSSQMSSDSSRSSSPSVDTSTDSQASEEIQVLPEERSDTPEVHPPLPISQSPENESNDRRSRRYSVSERSFGSRTTKKLSTLQSAPQQQTSSSPPPPLLTPPPPLQPASSISDHTPWLMPPTIPLASPFLPASTAPMQGKRKSILREPTFRWTSLKHSRSEPQYFSSAKYAKEGLIRKPIFDNFRPPPLTPEDVGFASGFSASGTAASARLFSPLHSGTRFDMHKRSPLLRAPRFTPSEAHSRIFESVTLPSNRTSAGTSSSGVSNRKRKRKVFSPIRSEPRSPSHSMRTRSGRLSSSELSPLTPPSSVSSSLSISVSPLATSALNPTFTFPSHSLTQSGESAEKNQRPRKQTSAPAEPFSSSSPTPLFPWFTPGSQTERGRNKDKAPEELSKDRDADKSVEKDKSRERDREREKENKRESRKEKRKKGSEIQSSSALYPVGRVSKEKVVGEDVATSSSAKKATGRKKSSSHDSGTDITSVTLGDTTAVKTKILIKKGRGNLEKTNLDLGPTAPSLEKEKTLCLSTPSSSTVKHSTSSIGSMLAQADKLPMTDKRVASLLKKAKAQLCKIEKSKSLKQTDQPKAQGQESDSSETSVRGPRIKHVCRRAAVALGRKRAVFPDDMPTLSALPWEEREKILSSMGNDDKSSIAGSEDAEPLAPPIKPIKPVTRNKAPQEPPVKKGRRSRRCGQCPGCQVPEDCGVCTNCLDKPKFGGRNIKKQCCKMRKCQNLQWMPSKAYLQKQAKAVKKKEKKSKTSEKKDSKESSVVKNVVDSSQKPTPSAREDPAPKKSSSEPPPRKPVEEKSEEGNVSAPGPESKQATTPASRKSSKQVSQPALVIPPQPPTTGPPRKEVPKTTPSEPKKKQPPPPESGPEQSKQKKVAPRPSIPVKQKPKEKEKPPPVNKQENAGTLNILSTLSNGNSSKQKIPADGVHRIRVDFKEDCEAENVWEMGGLGILTSVPITPRVVCFLCASSGHVEFVYCQVCCEPFHKFCLEENERPLEDQLENWCCRRCKFCHVCGRQHQATKQLLECNKCRNSYHPECLGPNYPTKPTKKKKVWICTKCVRCKSCGSTTPGKGWDAQWSHDFSLCHDCAKLFAKGNFCPLCDKCYDDDDYESKMMQCGKCDRWVHSKCENLSDEMYEILSNLPESVAYTCVNCTERHPAEWRLALEKELQISLKQVLTALLNSRTTSHLLRYRQAAKPPDLNPETEESIPSRSSPEGPDPPVLTEVSKQDDQQPLDLEGVKRKMDQGNYTSVLEFSDDIVKIIQAAINSDGGQPEIKKANSMVKSFFIRQMERVFPWFSVKKSRFWEPNKVSSNSGMLPNAVLPPSLDHNYAQWQEREENSHTEQPPLMKKIIPAPKPKGPGEPDSPTPLHPPTPPILSTDRSREDSPELNPPPGIEDNRQCALCLTYGDDSANDAGRLLYIGQNEWTHVNCALWSAEVFEDDDGSLKNVHMAVIRGKQLRCEFCQKPGATVGCCLTSCTSNYHFMCSRAKNCVFLDDKKVYCQRHRDLIKGEVVPENGFEVFRRVFVDFEGISLRRKFLNGLEPENIHMMIGSMTIDCLGILNDLSDCEDKLFPIGYQCSRVYWSTTDARKRCVYTCKIVECRPPVVEPDINSTVEHDENRTIAHSPTSFTESSSKESQNTAEIISPPSPDRPPHSQTSGSCYYHVISKVPRIRTPSYSPTQRSPGCRPLPSAGSPTPTTHEIVTVGDPLLSSGLRSIGSRRHSTSSLSPQRSKLRIMSPMRTGNTYSRNNVSSVSTTGTATDLESSAKVVDHVLGPLNSSTSLGQNTSTSSNLQRTVVTVGNKNSHLDGSSSSEMKQSSASDLVSKSSSLKGEKTKVLSSKSSEGSAHNVAYPGIPKLAPQVHNTTSRELNVSKIGSFAEPSSVSFSSKEALSFPHLHLRGQRNDRDQHTDSTQSANSSPDEDTEVKTLKLSGMSNRSSIINEHMGSSSRDRRQKGKKSCKETFKEKHSSKSFLEPGQVTTGEEGNLKPEFMDEVLTPEYMGQRPCNNVSSDKIGDKGLSMPGVPKAPPMQVEGSAKELQAPRKRTVKVTLTPLKMENESQSKNALKESSPASPLQIESTSPTEPISASENPGDGPVAQPSPNNTSCQDSQSNNYQNLPVQDRNLMLPDGPKPQEDGSFKRRYPRRSARARSNMFFGLTPLYGVRSYGEEDIPFYSSSTGKKRGKRSAEGQVDGADDLSTSDEDDLYYYNFTRTVISSGGEERLASHNLFREEEQCDLPKISQLDGVDDGTESDTSVTATTRKSSQIPKRNGKENGTENLKIDRPEDAGEKEHVTKSSVGHKNEPKMDNCHSVSRVKTQGQDSLEAQLSSLESSRRVHTSTPSDKNLLDTYNTELLKSDSDNNNSDDCGNILPSDIMDFVLKNTPSMQALGESPESSSSELLNLGEGLGLDSNREKDMGLFEVFSQQLPTTEPVDSSVSSSISAEEQFELPLELPSDLSVLTTRSPTVPSQNPSRLAVISDSGEKRVTITEKSVASSESDPALLSPGVDPTPEGHMTPDHFIQGHMDADHISSPPCGSVEQGHGNNQDLTRNSSTPGLQVPVSPTVPIQNQKYVPNSTDSPGPSQISNAAVQTTPPHLKPATEKLIVVNQNMQPLYVLQTLPNGVTQKIQLTSSVSSTPSVMETNTSVLGPMGGGLTLTTGLNPSLPTSQSLFPSASKGLLPMSHHQHLHSFPAATQSSFPPNISNPPSGLLIGVQPPPDPQLLVSESSQRTDLSTTVATPSSGLKKRPISRLQTRKNKKLAPSSTPSNIAPSDVVSNMTLINFTPSQLPNHPSLLDLGSLNTSSHRTVPNIIKRSKSSIMYFEPAPLLPQSVGGTAATAAGTSTISQDTSHLTSGSVSGLASSSSVLNVVSMQTTTTPTSSASVPGHVTLTNPRLLGTPDIGSISNLLIKASQQSLGIQDQPVALPPSSGMFPQLGTSQTPSTAAITAASSICVLPSTQTTGITAASPSGEADEHYQLQHVNQLLASKTGIHSSQRDLDSASGPQVSNFTQTVDAPNSMGLEQNKALSSAVQASPTSPGGSPSSPSSGQRSASPSVPGPTKPKPKTKRFQLPLDKGNGKKHKVSHLRTSSSEAHIPDQETTSLTSGTGTPGAEAEQQDTASVEQSSQKECGQPAGQVAVLPEVQVTQNPANEQESAEPKTVEEEESNFSSPLMLWLQQEQKRKESITEKKPKKGLVFEISSDDGFQICAESIEDAWKSLTDKVQEARSNARLKQLSFAGVNGLRMLGILHDAVVFLIEQLSGAKHCRNYKFRFHKPEEANEPPLNPHGSARAEVHLRKSAFDMFNFLASKHRQPPEYNPNDEEEEEVQLKSARRATSMDLPMPMRFRHLKKTSKEAVGVYRSPIHGRGLFCKRNIDAGEMVIEYAGNVIRSIQTDKREKYYDSKGIGCYMFRIDDSEVVDATMHGNAARFINHSCEPNCYSRVINIDGQKHIVIFAMRKIYRGEELTYDYKFPIEDASNKLPCNCGAKKCRKFLN

SEQ ID NO: 170 - DNA, 2021 bp, Homo sapiens
agccatatgggggatacgccagcaacagacgccggccgccaagatctgcatccctaggccacgctaagaccctggggaagagcgcaggagcccgggagaagggctggaaggaggggactggacgtgcggagaattcccccctaaaaggcagaagcccccgcccccaccctcgagctccgctcgggcagagcgcctgcctgcctgccgctgctgcgggcgcccacctcgcccagccatgccaggcccggccaccgacgcggggaagatccctttctgcgacgccaaggaagaaatccgtgccgggctcgaaagctctgagggcggcggcggcccggagaggccaggcgcgcgcgggcagcggcagaacatcgtctggaggaatgtcgtcctgatgagcttgctccacttgggggccgtgtactccctggtgctcatccccaaagccaagccactcactctgctctgggcctacttctgcctcctcctggccgctctgggtgtgacagctggtgcccatcgcttgtggagccacaggtcctaccgggccaagctgcctctgaggatatttctggctgtcgccaactccatggctttccagaatgacatcttcgagcggtccagggaccaccgagcccaccacaagtactcagagacggatgctgacccccacaatgcccgccggggcttcttcttctcccatattgggtggctgtttgttcgcaagcatcgagatgttattgagaaggggagaaagcttgacgtcactgacctgcttgctgatcctgtggtccggatccagagaaatacacagcacatccagaaagaaggaagagctctcaatcaagaggcagcgtgtgagatgcttcgtgagtggcatcaagggcatatattgaaagtcacccttcccggattacacattttagctttgttacatactcattgtaaccactccgaaaagtgctgcttgatgctgcgtgctctttctgtgtccctggaggtattctgaaggtcagaagagagatatacaacagcgaggcttggtgataacgtatagaataacagacggggactccacacccaggccttttttaacggtgtgaagcatagacagagctgcagtctgtgctaacattaggttatttattgattcaatcagttgacacaaggaggcagctacggggaggtaaaatatggtcctaaaatcaaaaagatttcagttttgtcattctgtctctgagattctatttccacatctagagcagggtaataatgatacctaccttacaaaattattgggagaatacattagttaatatatgtgaaagtatggaggagatgtgcaataaatatttgtgttattaactacacatacagcactctataggagatattccatttataaaaactttaggttctaaaaacctgtacacgttgattatttttgtaagtcaaaagtgattaagaggagtttaagctatcatttccagatgtatttctataaataaaaacataagtatattcagttgatttggggtggagagttccatagatgtctgttaggtccgcttggtccagagctgagttcaagtcctgaatatccttgttaattttctgtcttgttgatctgtctaatattgacagtggggtattaaagtctcccactattattatatgggagtctaagtctccttgtaggtctctaagaacttgctttatgaatctgggtgctcctgtattaggtgcatacatatttaggatagttagctcttcttgctgcattgatcccattaccattatataatgcccttctttgtcttttttgatctttgttggtttaaagtctgttttattagagactaggattgcaacccctgctatttttttttttttttttgcttgataaatattcctgtatccctttattttgagcctatatgtgtctttgcacgtgaggtgggtctcctgaatacagcacaccgatgggttttgactctaaaaaaaaaaaaaaaaaaaaaaaaaaa

SEQ ID NO: 171 - protein, 256 aa, Homo sapiens
MPGPATDAGKIPFCDAKEEIRAGLESSEGGGGPERPGARGQRQNIVWRNVVLMSLLHLGAVYSLVLIPKAKPLTLLWAYFCLLLAALGVTAGAHRLWSHRSYRAKLPLRIFLAVANSMAFQNDIFERSRDHRAHHKYSETDADPHNARRGFFFSHIGWLFVRKHRDVIEKGRKLDVTDLLADPVVRIQRNTQHIQKEGRALNQEAACEMLREWHQGHILKVTLPGLHILALLHTHCNHSEKCCLMLRALSVSLEVF

SEQ ID NO: 172 - DNA, 3507 bp, Homo sapiens
ccacgcgtccgagcggggcgcctgggtggatgggcgcttgggcgcctgggctgccggacggtgggaacggaagtcgctgtgggacgctgaggaagccaggatggcgactccgagcaagaagacgtcaactccaagcccccagccttccaagagagctctcccgagagacccttcgtcggaggtcccgagcaagaggaagaattcggccccgcagctgccgctgttgcagtcgtccgggcctttcgtggaaggctctatcgtccgcatctcgatggagaacttcctaacatatgatatttgtgaagtatctcctggaccccacttgaatatgatcgttggagccaatggaacagggaagtcgagcattgtgtgtgccatttgccttggtttagctggaaaacctgctttcatgggacgagcagataaggttgggttttttgtgaagagaggatgttctagaggcatggttgaaattgaattgttcagggcttctggaaatcttgtaatcacccgtgagattgatgtggcaaaaaatcagtccttttggttcatcaacaaaaaatctacaacccagaaaatagtggaagagaaagttgcagccttaaatattcaagtggggaatctttgccagtttctccctcaggacaaagttggagaatttgctaaactcagcaaaattgaactcctcgaagccactgaaaagtcaattggtcccccagaaatgcacaaatatcactgtgaactcaaaaacttaagggagaaagaaaaacagctcgagacctcatgcaaagagaaaactgagtatctacagaaaatggttcagaggaatgaaagatataaacaagatgtggagaggttctatgaacggaagcgacatttagatttaattgagatgcttgaagcaaaaaggccatgggtggaatatgaaaatgttcgtcaggaatatgaagaagtaaaactagttcgtgaccgagtgaaggaagaggtcagaaaacttaaagaagggcagattcctataacatgtcgaattgaagaaatggaaaacgagcgtcacaatttggaggctcgaatcaaagaaaaggcaacagatattaaggaggcatctcaaaaatgcaaacagaagcaagatgttatagaaaggaaagataaacatattgaggaacttcagcaggctttaatagtaaagcaaaatgaagagcttgaccgacagaggagaataggtaatacccgcaaaatgatagaggatttgcaaaatgaactaaagaccacggaaaactgcgagaatcttcagccccagattgatgccattacaaatgatctgagacggattcaggatgaaaaggcattatgtgaaggcgaaataattgataagcgaagagagagggaaactctagagaaggagaaaaagagtgtggacgatcatattgtacgttttgacaatcttatgaatcagaaggaagataagctaagacagagattccgtgacacgtatgatgctgttttatggctaagaaataacagagacaaatttaaacaaagagtctgtgagcccataatgctcacgatcaatatgaaagataataaaaatgccaaatatattgaaaatcatattccatcaaatgacttaagagcctttgtatttgaaagtcaagaagatatggaggttttcctcaaagaggttcgtgacaataaaaaattaagagtaaatgctgttattgctcccaagagttcatatgcagacaaagcaccttcaagatctttgaatgaacttaaacaatacggatttttctcttatttgagagaattatttgatgcacctgatcctgtaatgagttacctttgctgtcagtatcatattcatgaagttcctgtaggaactgaaaagaccagagaaagaattgaacgggtaatacaagaaacccgattaaaacagatttatacagcagaagaaaagtatgtggtgaaaacttctttttattcaaacaaagttatttctagtaacacatctctaaaagtagcgcagtttctcactgtcactgtggacctagagcagagaagacacttagaagaacagctaaaggaaattcatagaaaattgcaagcagtggattcagggttgattgccttacgtgaaacaagcaaacatctggagcacaaagacaatgaacttagacaaaagaagaaggagcttcttgagagaaaaaccaagaaaagacaactggaacaaaaaatcagttccaaactaggaagtttaaagctgatggaacaggatacttgcaatcttgaagaggaagagcgaaaagcaagtaccaaaatcaaagaaataaatgttcaaaaagcgaaacttgttaccgaattaacaaacctaataaagatttgtacttctttgcatatacaaaaagtagatttaattctccaaaatactacagtgatctctgagaagaacaaattagaatcagattatatggccgcatcttcacaactccgtcttacagagcaacatttcattgaattggatgaaaatagacagagattattgcagaaatgcaaggaacttatgaaaagagctaggcaagtatgtaacctgggtgcagagcagactcttcctcaagaataccagacacaagtacccaccattccaaatggacacaactcctcactccccatggttttccaagaccttccaaacacattggatgaaattgatgctttattaactgaagaaagatcaagagcttcctgcttcacgggactgaatcctacaattgttcaggaatatacaaaaagagaagaagaaatagaacagttaactgaggaactaaagggaaagaaagttgaactagatcaatacagggaaaacatttcacaggtaaaagaaaggtggcttaatcctttaaaagagctggtagaaaaaattaatgaaaaattcagcaatttttttagttccatgcagtgtgctggtgaagttgatctccatacagaaaatgaggaagattatgataaatatggaattcgaattagagtcaaatttcgaagtagtactcaactgcatgaattaactcctcatcatcaaagtggaggtgaaagaagtgtttctaccatgttatacttgatggcacttcaggagctaaatagatgtccattcagagtagttgatgaaatcaatcagggaatggacccaatcaatgaacggagagtgtttgaaatggttgtaaatactgcctgtaaagaaaatacatctcaatactttttcataacaccaaagctcctgcaaaatcttccttattctgaaaagatgacagttttgtttgtctacaatggccctcatatgctggaaccaaacacatggaatttaaaggctttccaaaggcggcggcgccgtattacattcactcaaccttcttaataaaagtaaagagagggaacttgggaattttttttgttaaattctgtttataagtatggctcaactgaataaaaggagattcactaaaaaaaaaaaaaaaa

SEQ ID NO: 173 - protein, 1101 aa, Homo sapiens
MATPSKKTSTPSPQPSKRALPRDPSSEVPSKRKNSAPQLPLLQSSGPFVEGSIVRISMENFLTYDICEVSPGPHLNMIVGANGTGKSSIVCAICLGLAGKPAFMGRADKVGFFVKRGCSRGMVEIELFRASGNLVITREIDVAKNQSFWFINKKSTTQKIVEEKVAALNIQVGNLCQFLPQDKVGEFAKLSKIELLEATEKSIGPPEMHKYHCELKNLREKEKQLETSCKEKTEYLQKMVQRNERYKQDVERFYERKRHLDLIEMLEAKRPWVEYENVRQEYEEVKLVRDRVKEEVRKLKEGQIPITCRIEEMENERHNLEARIKEKATDIKEASQKCKQKQDVIERKDKHIEELQQALIVKQNEELDRQRRIGNTRKMIEDLQNELKTTENCENLQPQIDAITNDLRRIQDEKALCEGEIIDKRRERETLEKEKKSVDDHIVRFDNLMNQKEDKLRQRFRDTYDAVLWLRNNRDKFKQRVCEPIMLTINMKDNKNAKYIENHIPSNDLRAFVFESQEDMEVFLKEVRDNKKLRVNAVIAPKSSYADKAPSRSLNELKQYGFFSYLRELFDAPDPVMSYLCCQYHIHEVPVGTEKTRERIERVIQETRLKQIYTAEEKYVVKTSFYSNKVISSNTSLKVAQFLTVTVDLEQRRHLEEQLKEIHRKLQAVDSGLIALRETSKHLEHKDNELRQKKKELLERKTKKRQLEQKISSKLGSLKLMEQDTCNLEEEERKASTKIKEINVQKAKLVTELTNLIKICTSLHIQKVDLILQNTTVISEKNKLESDYMAASSQLRLTEQHFIELDENRQRLLQKCKELMKRARQVCNLGAEQTLPQEYQTQVPTIPNGHNSSLPMVFQDLPNTLDEIDALLTEERSRASCFTGLNPTIVQEYTKREEEIEQLTEELKGKKVELDQYRENISQVKERWLNPLKELVEKINEKFSNFFSSMQCAGEVDLHTENEEDYDKYGIRIRVKFRSSTQLHELTPHHQSGGERSVSTMLYLMALQELNRCPFRVVDEINQGMDPINERRVFEMVVNTACKENTSQYFFITPKLLQNLPYSEKMTVLFVYNGPHMLEPNTWNLKAFQRRRRRITFTQPS

SEQ ID NO: 174 - DNA, 4189 bp, Homo sapiens
gcggctgtatttgcggcctgtgcgagtaggcgcttgggcactcagtctccctggcgagcgacgggcagaaatctcgaaccagtggagcgcactcgtaacctggatcccagaaggtcgcgaaggcagtaccgtttcctcagcggcggactgctgcagtaagaatgtcttttccacctcatttgaatcgccctcccatgggaatcccagcactcccaccagggatcccacccccgcagtttccaggatttcctccacctgtacctccagggaccccaatgattcctgtaccaatgagcattatggctcctgctccaactgtcttagtacccactgtgtctatggttggaaagcatttgggcgcaagaaaggatcatccaggcttaaaggctaaagaaaatgatgaaaattgtggtcctactaccactgtttttgttggcaacatttccgagaaagcttcagacatgcttataagacaactcttagctaaatgtggtttggttttgagctggaagagagtacaaggtgcttccggaaagcttcaagccttcggattctgtgagtacaaggagccagaatctaccctccgtgcactcagattattacatgacctgcaaattggagagaaaaagctactcgttaaagttgatgcaaagacaaaggcacagctggatgaatggaaagcaaagaagaaagcttctaatgggaatgcaaggccagaaactgtcactaatgacgatgaagaagccttggatgaagaaacaaagaggagagatcagatgattaaaggggctattgaagttttaattcgtgaatactccagtgagctaaatgccccctcacaggaatctgattctcaccccaggaagaagaagaaggaaaagaaggaggacattttccgcagatttccagtggccccactgatcccttatccactcatcactaaggaggatataaatgctatagaaatggaagaagacaaaagagacctgatatctcgagagatcagcaaattcagagacacacataagaaactggaagaagagaaaggcaaaaaggaaaaagaaagacaggaaattgagaaagagcggagagaaagagagagggagcgtgaaagggaacgagaaaggcgagaacgggaacgagaaagggaaagagaacgtgaacgagaaaaggagaaagaacgggagcgggaacgagaacgggatagggaccgtgaccggacaaaagagagagaccgagatcgggatcgagagagagatcgtgaccgggatagagaaaggagctcagatcgtaataaggatcgcagtcgatcaagagaaaaaagcagagatcgtgaaagggaacgagagcgggaaagagagagagagagagaacgagagcgagaacgagaacgggagcgagagagagagcgagagagggaacgggagcgagaaagagaaaaagacaaaaaacgggaccgagaagaagatgaagaagatgcatacgaacgaagaaaacttgaaagaaaactccgagagaaagaagctgcttatcaagagcgccttaagaattgggaaatcagagaacgaaagaaaacccgggaatatgagaaagaagctgaaagagaagaagaaagaagaagagaaatggccaaagaagctaaacgactaaaagaattcttagaagactatgatgatgatagagatgaccccaaatattacagaggaagtgctcttcagaaaaggttgcgtgatagagaaaaggaaatggaagcagatgaacgagataggaagagagagaaggaggagcttgaggaaatcaggcagcgccttctggcagaagggcatccagatccagatgcagagctccagaggatggaacaagaggctgagaggcgcaggcagccacaaataaagcaagagccagaatcagaagaggaggaagaagaaaagcaagaaaaagaagaaaaacgagaagaacccatggaagaggaagaggaaccagagcaaaagccttgtctgaaacctactctgaggcccatcagctctgctccatctgtttcctctgccagtggcaatgcaacacctaacactcctggggatgagtctccctgtggtattattattcctcatgaaaactcaccagatcaacagcaacctgaggagcataggccaaaaataggactaagtcttaaactgggtgcttccaatagtcctggtcagcctaattctgtgaagagaaagaaactacctgtagatagtgtctttaacaaatttgaggatgaagacagtgatgacgtaccccgaaaaaggaaactggttcccttggattatggtgaagatgataaaaatgcaaccaaaggcactgtaaacactgaagaaaagcgtaaacacattaagagtctcattgagaaaatccctacagccaaacctgagctcttcgcttatcccctggattggtctattgtggattctatactgatggaacgtcgaattagaccatggattaataagaaaatcatagaatatataggtgaagaagaagctacattagttgattttgtttgttctaaggttatggctcatagttcaccccagagcattttagatgatgttgccatggtacttgatgaagaagcagaagtttttatagtcaaaatgtggagattattgatatatgaaacagaagccaagaaaattggtcttgtgaagtaaaactttttatatttagagttccatttcagatttcttctttgccacccttttaaggactttgaatttttctttgtctttgaagacattgtgagatctgtaattttttttttttgtagaaaatgtgaattttttggtcctctaatttgttgttgccctgtgtactcccttggttgtaaagtcatctgaatccttggttctctttatactcaccaggtacaaattactggtatgttttataagccgcagctactgtacacagcctatctgatataatcttgttctgctgatttgtttcttgtaaatattaaaacgactccccaattattttgcagaattgcacttaatattgaaatgtactgtataggaaccaacatgaacaattttaattgaaaacaccagtcataaactattaccacccccactctcttttgatcagaaatggcaagcccttgtgaaggcatggagtttaaaattggaatgcaaaaattagcagacaatccattcctactgtatttctgtatgaatgtgtttgtgaatgtatgtgtaaaagtctttcttttccctaatttgctttggtggggtccttaaaacatttcccaactaaagaatagaattgtaaaggaaaagtggtactgttccaacctgaaatgtctgttataattaggttattagtttcccagagcatggtgttctcgtgtcgtgagcaatgtggtttgctaactggatggggttttcttattaataagatggctgcttcagcttctcttttaaaggaatgtggatcatagtgatttttccttttaattttattgctcagaaatgaggcatatcctaaaaatcctggagagctgtatttaatgcatttttgcactaattggtccttagtttaattctattgtatctgtttatttaacaaaaaattcatcataccaaaaagtgtaagtgaaaaccccctttaaaacaaaacaaaaaaatgaaataaaattaggcaaattgacagacagtgagagttttacaaacatgataggtattctgctcggcaatttgtaagtttacatgttatttaaggataaaggtaaatcattcaaggcagttaccaaccactaactatttgttttcatttttgtcttgtagaaggtttatatcttgttttaccttggctcattagtgtttaaaaatgtactgatgatgtgcttagagaaattcctggggctttcttcgttgtagatcagaatttcaccagggagtaaaattacctgaaaacgcaagaagttttaaacagcttttcacacaaattagatgcaactgttcccatgtctgagtacttatttaaaagaaaggtaaagattggcctgttagaaaaagcataatgtgagctttggattactggatttttttttttttaaacacacctggagaggacatttgaaaacactgttcttaccctcgaaccctgatgtggttccattatgtaaataaaaaaaaaaaaaaaaaaa

SEQ ID NO: 175 - protein, 843 aa, Homo sapiens
MSFPPHLNRPPMGIPALPPGIPPPQFPGFPPPVPPGTPMIPVPMSIMAPAPTVLVPTVSMVGKHLGARKDHPGLKAKENDENCGPTTTVFVGNISEKASDMLIRQLLAKCGLVLSWKRVQGASGKLQAFGFCEYKEPESTLRALRLLHDLQIGEKKLLVKVDAKTKAQLDEWKAKKKASNGNARPETVTNDDEEALDEETKRRDQMIKGAIEVLIREYSSELNAPSQESDSHPRKKKKEKKEDIFRRFPVAPLIPYPLITKEDINAIEMEEDKRDLISREISKFRDTHKKLEEEKGKKEKERQEIEKERRERERERERERERREREREREREREREKEKERERERERDRDRDRTKERDRDRDRERDRDRDRERSSDRNKDRSRSREKSRDREREREREREREREREREREREREREREREREREREKDKKRDREEDEEDAYERRKLERKLREKEAAYQERLKNWEIRERKKTREYEKEAEREEERRREMAKEAKRLKEFLEDYDDDRDDPKYYRGSALQKRLRDREKEMEADERDRKREKEELEEIRQRLLAEGHPDPDAELQRMEQEAERRRQPQIKQEPESEEEEEEKQEKEEKREEPMEEEEEPEQKPCLKPTLRPISSAPSVSSASGNATPNTPGDESPCGIIIPHENSPDQQQPEEHRPKIGLSLKLGASNSPGQPNSVKRKKLPVDSVFNKFEDEDSDDVPRKRKLVPLDYGEDDKNATKGTVNTEEKRKHIKSLIEKIPTAKPELFAYPLDWSIVDSILMERRIRPWINKKIIEYIGEEEATLVDFVCSKVMAHSSPQSILDDVAMVLDEEAEVFIVKMWRLLIYETEAKKIGLVK

SEQ ID NO: 176 - DNA, 4475 bp, Homo sapiens
tccggggctgagtccgcgtcgacgccggccgcggaggcggcaccatgggcaaggggtagaggggcaagttggccaccgccgccgccgggggtggtgggagagccgctccgggggcgggggccggtgggggagggaggggcgggcagccgcgccgccgcggcacttttttaattttttcgggtgccgcagcggcgacccctcggcgccgatgtccctgatccctggagcgacgacggccgctgcctaagctggaaagaggaatgccagctcctgagcaggcctcattggtggaggaggggcaaccacagacccgccaggaagctgcctccactggcccaggcatggaacccgagaccacagccaccactattctagcatccgtgaaggagcaggagcttcagtttcagcgactcacccgagaactggaagtggaaaggcagattgttgccagtcagctagaaagatgtaggcttggagcagaatcaccaagcatcgccagcaccagctcaactgagaagtcatttccttggagatcaacagacgtgccaaatactggtgtaagcaaacctagagtttctgacgctgtccagcccaacaactatctcatcaggacagagccagaacaaggaaccctctattcaccagaacagacatctctccatgaaagtgagggatcattgggtaactcaagaagttcaacacaaatgaattcttattccgacagtggataccaggaagcagggagtttccacaacagccagaacgtgagcaaggcagacaacagacagcagcattcattcataggatcaactaacaaccatgtggtgaggaattcaagagctgaaggacaaacactggttcagccatcagtagccaatcgggccatgagaagagttagttcagttccatctagagcacagtctccttcttatgttatcagcacaggcgtgtctccttcaagggggtctctgagaacttctctgggtagtggatttggctctccgtcagtgaccgacccccgacctctgaaccccagtgcatattcctccaccacattacctgctgcacgggcagcctctccgtactcacagagacccgcctccccaacagctatacggcggattgggtcagtcacctcccggcagacctccaatcccaacggaccaacccctcaataccaaaccaccgccagagtggggtccccactgaccctgacggatgcacagactcgagtagcttccccatcccaaggccaggtggggtcgtcgtcccccaaacgctcagggatgaccgccgtaccacagcatctgggaccttcactgcaaaggactgttcatgacatggagcaattcggacagcagcagtatgacatttatgagaggatggttccacccaggccagacagcctgacaggcttacggagttcctatgctagtcagcatagtcagcttgggcaagaccttcgttctgccgtgtctcccgacttgcacattactcctatatatgaggggaggacctattacagcccagtgtaccgcagcccaaaccatggaactgtggagctccaaggatcgcagacggcgttgtatcgcacaggttcagtaggtattggaaatctacaaaggacatccagccaacgaagtacccttacataccaaagaaataattatgctctgaacacaacagctacctacgcggagccctacaggcctatacaataccgagtgcaagagtgcaattataacaggcttcagcatgcagtgccggctgatgatggcaccacaagatccccatcaatagacagcattcagaaggaccccagggagtttgcctggcgtgatcctgagttgcctgaggtcattcacatgcttcagcaccagttcccatctgttcaggcaaatgcagcggcctacctgcagcacctgtgctttggtgacaacaaagtgaagatggaggtgtgtaggttagggggaatcaagcatctggttgaccttctggaccacagagttttggaagttcagaagaatgcttgtggtgcccttcgaaacctcgtttttggcaagtctacagatgaaaataaaatagcaatgaagaatgttggtgggatacctgccttgttgcgactgttgagaaaatctattgatgcagaagtaagggagcttgttacaggagttctttggaatttatcctcatgtgatgctgtaaaaatgacaatcattcgagatgctctctcaaccttaacaaacactgtgattgttccacattctggatggaataactcttcttttgatgatgatcataaaattaaatttcagacttcactagttctgcgtaacacgacaggttgcctaaggaacctcagctccgcgggggaagaagctcggaagcaaatgcggtcctgcgaggggctggtagactcactgttgtatgtgatccacacgtgtgtgaacacatccgattacgacagcaagacggtggagaactgcgtgtgcaccctgaggaacctgtcctatcggctggagctggaggtgccccaggcccggttactgggactgaacgaattggatgacttactaggaaaagagtctcccagcaaagactctgagccaagttgctgggggaagaagaagaaaaagaaaaagaggactccgcaagaagatcaatgggatggagttggtcctatcccaggactgtcgaagtcccccaaaggggttgagatgctgtggcacccatcggtggtaaaaccatatctgactcttctagcagaaagttccaacccagccaccttggaaggctctgcagggtctctccagaacctctctgctggcaactggaagtttgcagcatatatccgggcggccgtccgaaaagaaaaggggctccccatccttgtggagcttctgagaatggataacgatagagttgtttcttccgtggcaacagccttgaggaatatggcactagatgttcgcaacaaggagctcataggcaaatacgccatgcgagacctggtcaaccggctccccggcggcaatggccccagtgtcttgtctgatgagaccatggcagccatctgctgtgctctgcacgaggtcaccagcaaaaacatggagaacgcaaaagccctggccgactcaggaggcatagagaagctggtgaacataaccaaaggcaggggcgacagatcatctctgaaagtggtgaaggcagcagcccaggtcttgaatacattatggcaatatcgggacctccggagcatttataaaaaggatgggtggaatcagaaccattttattacacctgtgtcgacattggagcgagaccgattcaaatcacatccttccttgtctaccaccaaccaacagatgtcacccatcattcagtcaggctccagcaaaccttcaccaatttacatcagttcctattcctcaccagcaagagaacaaaatagacggctacagcatcaacagctgtattatagtcaagatgactccaacagaaagaactttgatgcatacagattgtatttgcagtctcctcatagctatgaagatccttattttgatgaccgagttcactttccagcttctactgattactcaacacagtatggactgaaatcgaccacaaattatgtagacttttattccactaaacgaccttcttatagagcagaacagtacccagggtccccagactcatgggtgtagcatcaagatgcccaacagaggaactctttctttctaaccttgttcagattgaggtgaaaagtccatcttgctgatttgatgattgaaatgtgaaagtgaagtggaaggaatgaatgaagtgtgttttttttttcttttttgaggaattatcagggaagtgaggaaatgtttgggagaggactttctaagctctatttaggtgttagatctaattacttatagattctgtagtctggtgaaggtgtgggtgacgtgatgagaggtttgagaaatgggtgaaatgaaatgggggatatgtaggtcaaatcaaattaaagatgatttttttaatgtgaataaagttatgttctgatagtttgtacagaaaaaataaaatggatgcccatgttttattgctattactaaatgtcaagattgtatgctattatgtcttgtaaatttcttttgttggtgtaaatatggaaatgccacattggttaagtgccatcatttgtaatgcaatgtgtcacttgaaaagagatttgaagaaactgacaacttcaaaaacaaatgagaagcccaaggaactgtgagcaattaaaagcaaaccgcgacaccctttgtctccaccacacatagtgtactttggaagcacaacgtccaggctggtaccgcagcgccatgcccattcctcgcctcgttcataggacacttcactgccattttctattcacataaaagaaaaataaatgtggaaatttcatccttggaaaaaaaaaaaaaaaa

SEQ ID NO: 177 - protein, 1149 aa, Homo sapiens
MPAPEQASLVEEGQPQTRQEAASTGPGMEPETTATTILASVKEQELQFQRLTRELEVERQIVASQLERCRLGAESPSIASTSSTEKSFPWRSTDVPNTGVSKPRVSDAVQPNNYLIRTEPEQGTLYSPEQTSLHESEGSLGNSRSSTQMNSYSDSGYQEAGSFHNSQNVSKADNRQQHSFIGSTNNHVVRNSRAEGQTLVQPSVANRAMRRVSSVPSRAQSPSYVISTGVSPSRGSLRTSLGSGFGSPSVTDPRPLNPSAYSSTTLPAARAASPYSQRPASPTAIRRIGSVTSRQTSNPNGPTPQYQTTARVGSPLTLTDAQTRVASPSQGQVGSSSPKRSGMTAVPQHLGPSLQRTVHDMEQFGQQQYDIYERMVPPRPDSLTGLRSSYASQHSQLGQDLRSAVSPDLHITPIYEGRTYYSPVYRSPNHGTVELQGSQTALYRTGSVGIGNLQRTSSQRSTLTYQRNNYALNTTATYAEPYRPIQYRVQECNYNRLQHAVPADDGTTRSPSIDSIQKDPREFAWRDPELPEVIHMLQHQFPSVQANAAAYLQHLCFGDNKVKMEVCRLGGIKHLVDLLDHRVLEVQKNACGALRNLVFGKSTDENKIAMKNVGGIPALLRLLRKSIDAEVRELVTGVLWNLSSCDAVKMTIIRDALSTLTNTVIVPHSGWNNSSFDDDHKIKFQTSLVLRNTTGCLRNLSSAGEEARKQMRSCEGLVDSLLYVIHTCVNTSDYDSKTVENCVCTLRNLSYRLELEVPQARLLGLNELDDLLGKESPSKDSEPSCWGKKKKKKKRTPQEDQWDGVGPIPGLSKSPKGVEMLWHPSVVKPYLTLLAESSNPATLEGSAGSLQNLSAGNWKFAAYIRAAVRKEKGLPILVELLRMDNDRVVSSVATALRNMALDVRNKELIGKYAMRDLVNRLPGGNGPSVLSDETMAAICCALHEVTSKNMENAKALADSGGIEKLVNITKGRGDRSSLKVVKAAAQVLNTLWQYRDLRSIYKKDGWNQNHFITPVSTLERDRFKSHPSLSTTNQQMSPIIQSGSSKPSPIYISSYSSPAREQNRRLQHQQLYYSQDDSNRKNFDAYRLYLQSPHSYEDPYFDDRVHFPASTDYSTQYGLKSTTNYVDFYSTKRPSYRAEQYPGSPDSWV

SEQ ID NO: 178 - DNA, 4604 bp, Homo sapiens
tccggggctgagtccgcgtcgacgccggccgcggaggcggcaccatgggcaaggggtagaggggcaagttggccaccgccgccgccgggggtggtgggagagccgctccgggggcgggggccggtgggggagggaggggcgggcagccgcgccgccgcggcacttttttaattttttcgggtgccgcagcggcgacccctcggcgccgatgtccctgatccctggagcgacgacggccgctgcctaagctggaaagaggaatgccagctcctgagcaggcctcattggtggaggaggggcaaccacagacccgccaggaagctgcctccactggcccaggcatggaacccgagaccacagccaccactattctagcatccgtgaaggagcaggagcttcagtttcagcgactcacccgagaactggaagtggaaaggcagattgttgccagtcagctagaaagatgtaggcttggagcagaatcaccaagcatcgccagcaccagctcaactgagaagtcatttccttggagatcaacagacgtgccaaatactggtgtaagcaaacctagagtttctgacgctgtccagcccaacaactatctcatcaggacagagccagaacaaggaaccctctattcaccagaacagacatctctccatgaaagtgagggatcattgggtaactcaagaagttcaacacaaatgaattcttattccgacagtggataccaggaagcagggagtttccacaacagccagaacgtgagcaaggcagacaacagacagcagcattcattcataggatcaactaacaaccatgtggtgaggaattcaagagctgaaggacaaacactggttcagccatcagtagccaatcgggccatgagaagagttagttcagttccatctagagcacagtctccttcttatgttatcagcacaggcgtgtctccttcaagggggtctctgagaacttctctgggtagtggatttggctctccgtcagtgaccgacccccgacctctgaaccccagtgcatattcctccaccacattacctgctgcacgggcagcctctccgtactcacagagacccgcctccccaacagctatacggcggattgggtcagtcacctcccggcagacctccaatcccaacggaccaacccctcaataccaaaccaccgccagagtggggtccccactgaccctgacggatgcacagactcgagtagcttccccatcccaaggccaggtggggtcgtcgtcccccaaacgctcagggatgaccgccgtaccacagcatctgggaccttcactgcaaaggactgttcatgacatggagcaattcggacagcagcagtatgacatttatgagaggatggttccacccaggccagacagcctgacaggcttacggagttcctatgctagtcagcatagtcagcttgggcaagaccttcgttctgccgtgtctcccgacttgcacattactcctatatatgaggggaggacctattacagcccagtgtaccgcagcccaaaccatggaactgtggagctccaaggatcgcagacggcgttgtatcgcacaggttcagtaggtattggaaatctacaaaggacatccagccaacgaagtacccttacataccaaagaaataattatgctctgaacacaacagctacctacgcggagccctacaggcctatacaataccgagtgcaagagtgcaattataacaggcttcagcatgcagtgccggctgatgatggcaccacaagatccccatcaatagacagcattcagaaggaccccagggagtttgcctggcgtgatcctgagttgcctgaggtcattcacatgcttcagcaccagttcccatctgttcaggcaaatgcagcggcctacctgcagcacctgtgctttggtgacaacaaagtgaagatggaggtgtgtaggttagggggaatcaagcatctggttgaccttctggaccacagagttttggaagttcagaagaatgcttgtggtgcccttcgaaacctcgtttttggcaagtctacagatgaaaataaaatagcaatgaagaatgttggtgggatacctgccttgttgcgactgttgagaaaatctattgatgcagaagtaagggagcttgttacaggagttctttggaatttatcctcatgtgatgctgtaaaaatgacaatcattcgagatgctctctcaaccttaacaaacactgtgattgttccacattctggatggaataactcttcttttgatgatgatcataaaattaaatttcagacttcactagttctgcgtaacacgacaggttgcctaaggaacctcagctccgcgggggaagaagctcggaagcaaatgcggtcctgcgaggggctggtagactcactgttgtatgtgatccacacgtgtgtgaacacatccgattacgacagcaagacggtggagaactgcgtgtgcaccctgaggaacctgtcctatcggctggagctggaggtgccccaggcccggttactgggactgaacgaattggatgacttactaggaaaagagtctcccagcaaagactctgagccaagttgctgggggaagaagaagaaaaagaaaaagaggactccgcaagaagatcaatgggatggagttggtcctatcccaggactgtcgaagtcccccaaaggggttgagatgctgtggcacccatcggtggtaaaaccatatctgactcttctagcagaaagttccaacccagccaccttggaaggctctgcagggtctctccagaacctctctgctggcaactggaagtttgcagcatatatccgggcggccgtccgaaaagaaaaggggctccccatccttgtggagcttctgagaatggataacgatagagttgtttcttccgtggcaacagccttgaggaatatggcactagatgttcgcaacaaggagctcataggcaaatacgccatgcgagacctggtcaaccggctccccggcggcaatggccccagtgtcttgtctgatgagaccatggcagccatctgctgtgctctgcacgaggtcaccagcaaaaacatggagaacgcaaaagccctggccgactcaggaggcatagagaagctggtgaacataaccaaaggcaggggcgacagatcatctctgaaagtggtgaaggcagcagcccaggtcttgaatacattatggcaatatcgggacctccggagcatttataaaaaggatgggtggaatcagaaccattttattacacctgtgtcgacattggagcgagaccgattcaaatcacatccttccttgtctaccaccaaccaacagatgtcacccatcattcagtcagtcggcagcacctcttcctcaccagcactgttaggaatcagagaccctcgctctgaatacgataggacccagccacctatgcagtattacaatagccaaggggatgccacacataaaggcctgtaccctggctccagcaaaccttcaccaatttacatcagttcctattcctcaccagcaagagaacaaaatagacggctacagcatcaacagctgtattatagtcaagatgactccaacagaaagaactttgatgcatacagattgtatttgcagtctcctcatagctatgaagatccttattttgatgaccgagttcactttccagcttctactgattactcaacacagtatggactgaaatcgaccacaaattatgtagacttttattccactaaacgaccttcttatagagcagaacagtacccagggtccccagactcatgggtgtagcatcaagatgcccaacagaggaactctttctttctaaccttgttcagattgaggtgaaaagtccatcttgctgatttgatgattgaaatgtgaaagtgaagtggaaggaatgaatgaagtgtgttttttttttcttttttgaggaattatcagggaagtgaggaaatgtttgggagaggactttctaagctctatttaggtgttagatctaattacttatagattctgtagtctggtgaaggtgtgggtgacgtgatgagaggtttgagaaatgggtgaaatgaaatgggggatatgtaggtcaaatcaaattaaagatgatttttttaatgtgaataaagttatgttctgatagtttgtacagaaaaaataaaatggatgcccatgttttattgctattactaaatgtcaagattgtatgctattatgtcttgtaaatttcttttgttggtgtaaatatggaaatgccacattggttaagtgccatcatttgtaatgcaatgtgtcacttgaaaagagatttgaagaaactgacaacttcaaaaacaaatgagaagcccaaggaactgtgagcaattaaaagcaaaccgcgacaccctttgtctccaccacacatagtgtactttggaagcacaacgtccaggctggtaccgcagcgccatgcccattcctcgcctcgttcataggacacttcactgccattttctattcacataaaagaaaaataaatgtggaaatttcatccttggaaaaaaaaaaaaaaaa

SEQ ID NO: 179 - protein, 1192 aa, Homo sapiens
MPAPEQASLVEEGQPQTRQEAASTGPGMEPETTATTILASVKEQELQFQRLTRELEVERQIVASQLERCRLGAESPSIASTSSTEKSFPWRSTDVPNTGVSKPRVSDAVQPNNYLIRTEPEQGTLYSPEQTSLHESEGSLGNSRSSTQMNSYSDSGYQEAGSFHNSQNVSKADNRQQHSFIGSTNNHVVRNSRAEGQTLVQPSVANRAMRRVSSVPSRAQSPSYVISTGVSPSRGSLRTSLGSGFGSPSVTDPRPLNPSAYSSTTLPAARAASPYSQRPASPTAIRRIGSVTSRQTSNPNGPTPQYQTTARVGSPLTLTDAQTRVASPSQGQVGSSSPKRSGMTAVPQHLGPSLQRTVHDMEQFGQQQYDIYERMVPPRPDSLTGLRSSYASQHSQLGQDLRSAVSPDLHITPIYEGRTYYSPVYRSPNHGTVELQGSQTALYRTGSVGIGNLQRTSSQRSTLTYQRNNYALNTTATYAEPYRPIQYRVQECNYNRLQHAVPADDGTTRSPSIDSIQKDPREFAWRDPELPEVIHMLQHQFPSVQANAAAYLQHLCFGDNKVKMEVCRLGGIKHLVDLLDHRVLEVQKNACGALRNLVFGKSTDENKIAMKNVGGIPALLRLLRKSIDAEVRELVTGVLWNLSSCDAVKMTIIRDALSTLTNTVIVPHSGWNNSSFDDDHKIKFQTSLVLRNTTGCLRNLSSAGEEARKQMRSCEGLVDSLLYVIHTCVNTSDYDSKTVENCVCTLRNLSYRLELEVPQARLLGLNELDDLLGKESPSKDSEPSCWGKKKKKKKRTPQEDQWDGVGPIPGLSKSPKGVEMLWHPSVVKPYLTLLAESSNPATLEGSAGSLQNLSAGNWKFAAYIRAAVRKEKGLPILVELLRMDNDRVVSSVATALRNMALDVRNKELIGKYAMRDLVNRLPGGNGPSVLSDETMAAICCALHEVTSKNMENAKALADSGGIEKLVNITKGRGDRSSLKVVKAAAQVLNTLWQYRDLRSIYKKDGWNQNHFITPVSTLERDRFKSHPSLSTTNQQMSPIIQSVGSTSSSPALLGIRDPRSEYDRTQPPMQYYNSQGDATHKGLYPGSSKPSPIYISSYSSPAREQNRRLQHQQLYYSQDDSNRKNFDAYRLYLQSPHSYEDPYFDDRVHFPASTDYSTQYGLKSTTNYVDFYSTKRPSYRAEQYPGSPDSWV

SEQ ID NO: 180 - DNA, 3277 bp, Homo sapiens
aatcgctcggcctcccccatcccccgggtaacggtcgctggtgagtttaaatgagcaggggctggccgggccggagccgctacagggggggcctgaggcactgcagaaagtgggcctgagcctcgaggatgacggtgctgcaggaacccgtccaggctgctatatggcaagcactaaaccactatgcttaccgagatgcggttttcctcgcagaacgcctttatgcagaagtacactcagaagaagccttgtttttactggcaacctgttattaccgctcaggaaaggcatataaagcatatagactcttgaaaggacacagttgtactacaccgcaatgcaaatacctgcttgcaaaatgttgtgttgatctcagcaagcttgcagaaggggaacaaatcttatctggtggagtgtttaataagcagaaaagccatgatgatattgttactgagtttggtgattcagcttgctttactctttcattgttgggacatgtatattgcaagacagatcggcttgccaaaggatcagaatgttaccaaaagagccttagtttaaatcctttcctctggtctccctttgaatcattatgtgaaataggtgaaaagccagatcctgaccaaacatttaaattcacatctttacagaactttagcaactgtctgcccaactcttgcacaacacaagtacctaatcatagtttatctcacagacagcctgagacagttcttacggaaacaccccaggacacaattgaattaaacagattgaatttagaatcttccaattcaaagtactccttgaatacagattcctcagtgtcttatattgattcagctgtaatttcacctgatactgtcccactgggaacaggaacttccatattatctaaacaggttcaaaataaaccaaaaactggtcgaagtttattaggaggaccagcagctcttagtccattaaccccaagttttgggattttgccattagaaaccccaagtcctggagatggatcctatttacaaaactacactaatacacctcctgtaattgatgtgccatccaccggagccccttcaaaaaagtctgttgccagaatcggccaaactggaacaaagtctgtcttctcacagagtggaaatagccgagaggtaactccaattcttgcacaaacacaaagttctggtccacaaacaagtacaacacctcaggtattgagccccactattacatctcccccaaacgcactgcctcgaagaagttcacgactctttactagtgacagctccacaaccaaggagaatagcaaaaaattaaaaatgaagtttccacctaaaatcccaaacagaaaaacaaaaagtaaaactaataaaggaggaataactcaacctaacataaatgatagcctggaaattacaaaattggactcttccatcatttcagaagggaaaatatccacaatcacacctcagattcaggcctttaatctacaaaaagcagcagcagcaggtttgatgagccttcttcgtgaaatggggaaaggttatttagctttgtgttcatacaactgcaaagaagctataaatattttgagccatctaccttctcaccactacaatactggttgggtactgtgccaaattggaagggcctattttgaactttcagagtacatgcaagctgaaagaatattctcagaggttagaaggattgagaattatagagttgaaggcatggagatctactctacaacactttggcatcttcaaaaagatgttgctctttcagttctgtcaaaagacttaacagacatggataaaaattcgccagaggcctggtgtgctgcagggaactgtttcagtctgcaacgggaacatgatattgcaattaaattcttccagagagctatccaagttgatccaaattacgcttatgcctatactctattagggcatgagtttgtcttaactgaagaattggacaaagcattagcttgttttcgaaatgctatcagagtcaatcctagacattataatgcatggtatggtttaggaatgatttattacaagcaagaaaaattcagccttgcagaaatgcatttccaaaaagcgcttgatatcaaccctcaaagttcagttttactttgccacattggagtagttcaacatgcactgaaaaaatcagagaaggctttggataccctaaacaaagccattgtcattgatcccaagaaccctctatgcaaatttcacagagcctcagttttatttgcaaatgaaaaatataagtctgctttacaagaacttgaagaattgaaacaaattgttcccaaagaatccctcgtttacttcttaataggaaaggtttacaagaagttaggtcaaacgcacctcgccctgatgaatttctcttgggctatggatttagatcctaaaggagccaataaccagattaaagaggcaattgataagcgttatcttccagatgatgaggagccaataacccaagaagaacagatcatgggaacagatgaatcccaggagagcagcatgacagatgcggatgacacacaacttcatgcagctgaaagtgatgaattttaacttctggaaatcagacttttacaactggatgtgtgactagtgctgacgtgtttcttgtccctctgtatactgagtctttactcttgagctggcggtgtcatcgtccgtcacttataccatgagtgtgccactttcattggaccctgactgtatacagaatgaaaggcagtgcaatatttagctgctaacaagactggctcttttaccagtatgaatgacaatttatggggggtagggtggggaactttcttttctgtttttctttaatctccctttgttggaaagtatcatgaaggaagagttatgctttatcttgaaggaaccattagatatggaaaatagtgatgaaccagagtttcttggttgctttttcaaaaatttgtttttatttggttctgttccagataaacagagtaactgaccttcatttctaggttcttcaagaatggtgtttgcaagtgccagatggaacaataaaagacgttgcctataacagtgacttgattgccaaggaatgtaaattaccttaaacttcgatgatctcccataaacaaatgtaatgggcatattgggactcgtatgtaggaatcaaatatccctccatacagtgtactcttattcttggcaagaatgctttaatgtataaccaagaattttaatttattcatcttgct

SEQ ID NO: 181 - protein, 824 aa, Homo sapiens
MTVLQEPVQAAIWQALNHYAYRDAVFLAERLYAEVHSEEALFLLATCYYRSGKAYKAYRLLKGHSCTTPQCKYLLAKCCVDLSKLAEGEQILSGGVFNKQKSHDDIVTEFGDSACFTLSLLGHVYCKTDRLAKGSECYQKSLSLNPFLWSPFESLCEIGEKPDPDQTFKFTSLQNFSNCLPNSCTTQVPNHSLSHRQPETVLTETPQDTIELNRLNLESSNSKYSLNTDSSVSYIDSAVISPDTVPLGTGTSILSKQVQNKPKTGRSLLGGPAALSPLTPSFGILPLETPSPGDGSYLQNYTNTPPVIDVPSTGAPSKKSVARIGQTGTKSVFSQSGNSREVTPILAQTQSSGPQTSTTPQVLSPTITSPPNALPRRSSRLFTSDSSTTKENSKKLKMKFPPKIPNRKTKSKTNKGGITQPNINDSLEITKLDSSIISEGKISTITPQIQAFNLQKAAAAGLMSLLREMGKGYLALCSYNCKEAINILSHLPSHHYNTGWVLCQIGRAYFELSEYMQAERIFSEVRRIENYRVEGMEIYSTTLWHLQKDVALSVLSKDLTDMDKNSPEAWCAAGNCFSLQREHDIAIKFFQRAIQVDPNYAYAYTLLGHEFVLTEELDKALACFRNAIRVNPRHYNAWYGLGMIYYKQEKFSLAEMHFQKALDINPQSSVLLCHIGVVQHALKKSEKALDTLNKAIVIDPKNPLCKFHRASVLFANEKYKSALQELEELKQIVPKESLVYFLIGKVYKKLGQTHLALMNFSWAMDLDPKGANNQIKEAIDKRYLPDDEEPITQEEQIMGTDESQESSMTDADDTQLHAAESDEF

SEQ ID NO: 182 - DNA, 4131 bp, Homo sapiens
ttttgtttggctgaggggagcgagcggcgctttgggggaggggtcgcgtaggcgcctcacctgaccctgcggccgtgcggttgctgctccggggcaggtctccttccaggccaggggcccggaatcatgtacataaagcaggtgattatccagggttttcgaagttacagagatcaaacaattgtagatcccttcagttcaaaacataatgtgattgtgggcagaaatggatctggaaaaagtaactttttttatgcaattcagtttgttctcagtgatgagtttagtcatcttcgtccagaacagcggttggctttattgcatgaaggtactggtcctcgtgttatttctgcttttgtggagattatttttgataattcagacaaccggttaccaatcgataaagaggaagtttcacttcgaagagttattggtgccaaaaaggatcagtatttcttagacaagaagatggtcacgaaaaatgatgtgatgaacctccttgaaagcgctggtttttctcgaagcaatccttattatattgttaaacaaggaaagatcaaccagatggcaacagcaccagattctcagagattaaagctattaagagaagtagctggtactagagtgtatgacgaacgaaaggaagaaagcatctccttaatgaaagaaacagagggcaaacgggaaaaaatcaatgagttgttaaaatacattgaagagagattacatactctagaggaagaaaaggaagaactagctcagtatcagaagtgggataaaatgagacgagccctggaatataccatttacaatcaggaacttaacgagactcgtgccaaacttgatgagctttctgctaagcgagagactagtggagaaaaatccagacaattaagagatgctcagcaggatgcaagagataaaatggaggatatcgaacgccaagttagagaattgaaaacaaaaatttcagctatgaaagaagaaaaagaacagcttagtgctgaaagacaagagcagattaagcagaggactaagttggagcttaaagccaaggatttacaagatgaactagcaggcaatagtgaacaaaggaaacgtttattaaaagagaggcagaagctgcttgaaaaaatagaagaaaagcagaaagaactggcagaaacagaacccaaattcaacagtgtgaaagagaaagaagaacgaggaattgctagattggctcaagctacccaggaaagaacggatctttatgcaaagcagggtcgaggaagccagtttacatcaaaagaagaaagggataagtggattaaaaaggaactcaagtctttagatcaggctattaatgacaagaaaagacagattgctgctatacataaggatttggaagacactgaagcaaataaagagaaaaatctggagcagtataataaactggaccaggatcttaatgaagtcaaagctcgagtagaagaactggacagaaaatattacgaagtaaaaaataagaaagatgaactacaaagtgaaagaaactacttgtggagagaagagaatgcagaacagcaagcacttgctgctaaaagagaagatcttgaaaagaagcaacaacttcttagagcagcaacaggaaaggccattttaaatggaatagacagcataaacaaagtgctagaccacttccgtcgaaaaggaataaaccagcatgttcaaaatggctatcatggtattgtaatgaataactttgaatgtgaaccagctttctacacatgcgtggaagtcactgctggaaacaggttattttatcacattgttgattcagatgaagtcagcacgaagattttaatggagtttaataaaatgaatcttcctggagaggttacttttctgcctcttaacaagttagatgtcagggatacagcctatcctgaaaccaatgatgctattcctatgatcagcaaactgaggtacaatcccagatttgacaaagctttcaaacatgtgtttggaaagactcttatttgtcgtagcatggaagtttcaacccagctggcccgtgctttcactatggactgtattactttggaaggtgaccaagtcagccatcggggtgctctaactgggggttattatgacacaaggaagtctcgacttgaattgcaaaaagatgttagaaaagcagaagaagaactaggtgaacttgaagcaaagctcaatgaaaacctgcgcagaaatattgaaaggattaataatgaaattgatcagttgatgaaccaaatgcaacagatcgagacccagcaaaggaaatttaaagcatctagagatagcatattatcagaaatgaagatgctaaaagagaagaggcagcagtcagagaaaaccttcatgcctaagcaacgtagcttacagagtttggaggcaagcttgcatgctatggagtctaccagagagtcattgaaagcagaactgggaactgatttgctttctcaactgagtttggaagatcagaagagagtagatgcactgaatgatgagattcgtcaacttcagcaggaaaacagacagttgctaaatgaaagaattaaattagaaggtattattactcgagtagagacttatctcaatgagaatctgagaaaacgcttggaccaagtagaacaggaacttaatgagctgagagagacagaagggggtactgttctcacagccacaacatcagaacttgaagccatcaataaaagagtaaaagacactatggcacgatcagaagatttggacaattccattgataaaacagaagctggaattaaggagcttcagaagagtatggagcgctggaaaaatatggaaaaagaacatatggatgctataaatcatgatactaaagaactggaaaagatgacaaatcggcaaggcatgctattgaagaagaaagaagagtgtatgaagaaaattcgagaacttggatcacttccccaggaagcatttgaaaagtaccagacactgagcctcaaacagttgtttcgaaaacttgagcagtgcaacacagaattaaagaagtacagccatgttaacaaaaaggctttggatcagtttgtaaatttctccgagcagaaagaaaagttaataaagcgtcaagaagagttagataggggttacaaatcaatcatggaactgatgaatgtacttgaacttcggaaatatgaagctattcagttaactttcaaacaggtatctaagaacttcagtgaagtattccagaagttagtacctggtggcaaagctactttggtgatgaagaaaggagatgtggagggcagtcagtctcaagatgaaggagaagggagtggtgagagtgagaggggttctggctcacaaagcagtgtcccatcagttgaccagtttactggagttggaattagggtgtcatttacaggaaaacaaggtgaaatgagagaaatgcaacagctttcaggtggacagaaatccttggtagcccttgctctgatttttgccattcagaaatgtgacccggctccattttacttgtttgatgaaattgaccaggctctggatgctcagcacagaaaggctgtgtcagatatgattatggaacttgctgtacatgctcagtttattacaactacttttaggcctgaactgcttgagtcagctgacaaattctatggtgtaaagttcagaaataaggttagtcatattgatgtgatcacagcagagatggccaaagactttgtagaagatgataccacacatggttaattggaaaatactacctactggtttgggagatgtatatagtaatatgattctcatacccaggaactgtaaatttaaacctaaatatttggccaatagttttcagacttaaagcatcatagtccttttatatttgtctttgtattttataagatactctgtaatgtcatgtttgtactgatagtttaagaatttaatttcctgtacaactttttgtaaaatgttctgctcctattttaaatgttttgaaacatgctaaatattctttcctaattattttatcacttatactaccttttttatagcttcaattaaataatcggttttatgactaaaaaaaaaaaaaaaaaaaaa

SEQ ID NO: 183 - protein, 1217 aa, Homo sapiens
MYIKQVIIQGFRSYRDQTIVDPFSSKHNVIVGRNGSGKSNFFYAIQFVLSDEFSHLRPEQRLALLHEGTGPRVISAFVEIIFDNSDNRLPIDKEEVSLRRVIGAKKDQYFLDKKMVTKNDVMNLLESAGFSRSNPYYIVKQGKINQMATAPDSQRLKLLREVAGTRVYDERKEESISLMKETEGKREKINELLKYIEERLHTLEEEKEELAQYQKWDKMRRALEYTIYNQELNETRAKLDELSAKRETSGEKSRQLRDAQQDARDKMEDIERQVRELKTKISAMKEEKEQLSAERQEQIKQRTKLELKAKDLQDELAGNSEQRKRLLKERQKLLEKIEEKQKELAETEPKFNSVKEKEERGIARLAQATQERTDLYAKQGRGSQFTSKEERDKWIKKELKSLDQAINDKKRQIAAIHKDLEDTEANKEKNLEQYNKLDQDLNEVKARVEELDRKYYEVKNKKDELQSERNYLWREENAEQQALAAKREDLEKKQQLLRAATGKAILNGIDSINKVLDHFRRKGINQHVQNGYHGIVMNNFECEPAFYTCVEVTAGNRLFYHIVDSDEVSTKILMEFNKMNLPGEVTFLPLNKLDVRDTAYPETNDAIPMISKLRYNPRFDKAFKHVFGKTLICRSMEVSTQLARAFTMDCITLEGDQVSHRGALTGGYYDTRKSRLELQKDVRKAEEELGELEAKLNENLRRNIERINNEIDQLMNQMQQIETQQRKFKASRDSILSEMKMLKEKRQQSEKTFMPKQRSLQSLEASLHAMESTRESLKAELGTDLLSQLSLEDQKRVDALNDEIRQLQQENRQLLNERIKLEGIITRVETYLNENLRKRLDQVEQELNELRETEGGTVLTATTSELEAINKRVKDTMARSEDLDNSIDKTEAGIKELQKSMERWKNMEKEHMDAINHDTKELEKMTNRQGMLLKKKEECMKKIRELGSLPQEAFEKYQTLSLKQLFRKLEQCNTELKKYSHVNKKALDQFVNFSEQKEKLIKRQEELDRGYKSIMELMNVLELRKYEAIQLTFKQVSKNFSEVFQKLVPGGKATLVMKKGDVEGSQSQDEGEGSGESERGSGSQSSVPSVDQFTGVGIRVSFTGKQGEMREMQQLSGGQKSLVALALIFAIQKCDPAPFYLFDEIDQALDAQHRKAVSDMIMELAVHAQFITTTFRPELLESADKFYGVKFRNKVSHIDVITAEMAKDFVEDDTTHG

SEQ ID NO: 184 - DNA, 777 bp, Homo sapiens
catgctgttctgacagtttgagattacttattgtcttttctgggaagacaaaaacatgtcggagactgctccacttgctcctaccattcctgcacccgcagaaaaaacacctgtgaagaaaaaggcgaagaaggcaggcgcaactgctgggaaacgcaaagcatccggacccccagtatctgagcttatcaccaaggcagtggcagcttctaaggagcgcagcggcgtttctctggccgcgcttaagaaagcgcttgcggctgctggctacgatgtagaaaaaaacaacagccgtatcaagcttggcctcaagagcttggtgagcaaaggtactctggtgcagaccaaaggtaccggtgcttctggctccttcaaactcaacaagaaagcggcttccggggaaggcaaacccaaggccaaaaaggctggcgcagccaagcctaggaagcctgctggggcagccaagaagcccaagaaggtggctggcgccgctaccccgaagaaaagcatcaaaaagactcctaagaaggtaaagaagccagcaaccgctgctgggaccaagaaagtggccaagagtgcgaaaaaggtgaaaacacctcagccaaaaaaagctgccaagagtccagctaaggccaaagcccctaagcccaaggcggccaagcctaagtcggggaagccgaaggttacaaaggcaaagaaggcagctccgaagaaaaagtgaaactggcgggacgttcccctttgaaaattttaaacggctcttttcagagccaccca

SEQ ID NO: 185 - protein, 221 aa, Homo sapiens
MSETAPLAPTIPAPAEKTPVKKKAKKAGATAGKRKASGPPVSELITKAVAASKERSGVSLAALKKALAAAGYDVEKNNSRIKLGLKSLVSKGTLVQTKGTGASGSFKLNKKAASGEGKPKAKKAGAAKPRKPAGAAKKPKKVAGAATPKKSIKKTPKKVKKPATAAGTKKVAKSAKKVKTPQPKKAAKSPAKAKAPKPKAAKPKSGKPKVTKAKKAAPKKK

SEQ ID NO: 186 - DNA, 3338 bp, Homo sapiens
gacgccaccgggcgctgacagacctatggagagtcagggtgtgcctcccgggccttatcgggccaccaagctgtggaatgaagttaccacatcttttcgagcaggaatgcctctaagaaaacacagacaacactttaaaaaatatggcaattgtttcacagcaggagaagcagtggattggctttatgacctattaagaaataatagcaattttggtcctgaagttacaaggcaacagactatccaactgttgaggaaatttcttaagaatcatgtaattgaagatatcaaagggaggtggggatcagaaaatgttgatgataacaaccagctcttcagatttcctgcaacttcgccacttaaaactctaccacgaaggtatccagaattgagaaaaaacaacatagagaacttttccaaagataaagatagcatttttaaattacgaaacttatctcgtagaactcctaaaaggcatggattacatttatctcaggaaaatggcgagaaaataaagcatgaaataatcaatgaagatcaagaaaatgcaattgataatagagaactaagccaggaagatgttgaagaagtttggagatatgttattctgatctacctgcaaaccattttaggtgtgccatccctagaagaagtcataaatccaaaacaagtaattccccaatatataatgtacaacatggccaatacaagtaaacgtggagtagttatactacaaaacaaatcagatgacctccctcactgggtattatctgccatgaagtgcctagcaaattggccaagaagcaatgatatgaataatccaacttatgttggatttgaacgagatgtattcagaacaatcgcagattattttctagatctccctgaacctctacttacttttgaatattacgaattatttgtaaacattttgggcttgctgcaacctcatttagagagggttgccatcgatgctctacagttatgttgtttgttacttcccccaccaaatcgtagaaagcttcaacttttaatgcgtatgatttcccgaatgagtcaaaatgttgatatgcccaaacttcatgatgcaatgggtacgaggtcactgatgatacataccttttctcgatgtgtgttatgctgtgctgaagaagtggatcttgatgagcttcttgctggaagattagtttctttcttaatggatcatcatcaggaaattcttcaagtaccctcttacttacagactgcagtggaaaaacatcttgactacttaaaaaagggacatattgaaaatcctggagatggactatttgctcctttgccaacttactcatactgtaagcagattagtgctcaggagtttgatgagcaaaaagtttctacctctcaagctgcaattgcagaacttttagaaaatattattaaaaacaggagtttacctctaaaggagaaaagaaaaaaactaaaacagtttcagaaggaatatcctttgatatatcagaaaagatttccaaccacggagagtgaagcagcactttttggtgacaaacctacaatcaagcaaccaatgctgattttaagaaaaccaaagttccgtagtctaagataactaactgaattaaaaattatgtaatacttgtggaactttgataaatgaagccatatctgagaatgtagctactcaaaaggaagtctgtcattaataaggtatttctaaataaacacattatgtaaggaagtgccaaaatagttatcaatgtgagactcttaggaaactaactagatctcaattgagagcacataacaatagatgataccaaatactttttgtttttaacacagctatccagtaaggctatcatgatgtgtgctaaaattttatttacttgaattttgaaaactgagctgtgttagggattaaactataattctgttcttaaaagaaaatttatctgcaaatgtgcaagttctgagatattagctaatgaattagttgtttggggttacttctttgtttctaagtataagaatgtgaagaatatttgaaaactcaatgaaataattctcagctgccaaatgttgcactcttttatatattctttttccacttttgatctatttatatatatgtatgtgtttttaaaatatgtgtatattttatcagatttggttttgccttaaatattatccccaattgcttcagtcattcatttgttcagtatatatattttgaattctagttttcataatctattagaagatggggatataaaagaagtataaggcaatcatatattcattcaaaagatatttatttagcaactgctatgtgcctttcgttgttccagatatgcagagacaatgataaataaaacatataatctcttccataaggtatttattttttaatcaagggagatacacctatcagatgtttaaaataacaacactacccactgaaatcagggcatatagaatcattcagctaaagagtgacttctatgatgatggaacaggtctctaagctagtggttttcaaactggtacacattagactcacccgaggaattttaaaacagcctatatgcccagggcctaacttacactaattaaatctgaattttggggatgttgtatagggattagtattttttttaatctaggtgattccaatattcagccaactgtgagaatcaatggcctaaatgctttttataaacatttttataagtgtcaagataatggcacattgactttattttttcattggaagaaaatgcctgccaagtataaatgactctcatcttaaaacaaggttcttcaggtttctgcttgattgacttggtacaaacttgaagcaagttgccttctaatttttactccaagattgtttcatatctattccttaagtgtaaagaaatatataatgcatggtttgtaataaaatcttaatgtttaatgactgttctcatttctcaatgtaatttcatactgtttctctataaaatgatagtattccatttaacattactgatttttattaaaaacctggacagaaaattataaattataaatatgactttatcctggctataaaattattgaaccaaaatgaattctttctaaggcatttgaatactaaaacgtttattgtttatagatatgtaaaatgtggattatgttgcaaattgagattaaaattatttggggttttgtaacaatataattttgcttttgtattatagacaaatatataaataataaaggcaggcaactttcatttgcaaaaaaaaaaaaaaaaaaaaaaaaaaaaaaaaaaaaaaaaaaaaaaaaaaaaa

SEQ ID NO: 187 - protein, 527 aa, Homo sapiens
MESQGVPPGPYRATKLWNEVTTSFRAGMPLRKHRQHFKKYGNCFTAGEAVDWLYDLLRNNSNFGPEVTRQQTIQLLRKFLKNHVIEDIKGRWGSENVDDNNQLFRFPATSPLKTLPRRYPELRKNNIENFSKDKDSIFKLRNLSRRTPKRHGLHLSQENGEKIKHEIINEDQENAIDNRELSQEDVEEVWRYVILIYLQTILGVPSLEEVINPKQVIPQYIMYNMANTSKRGVVILQNKSDDLPHWVLSAMKCLANWPRSNDMNNPTYVGFERDVFRTIADYFLDLPEPLLTFEYYELFVNILGLLQPHLERVAIDALQLCCLLLPPPNRRKLQLLMRMISRMSQNVDMPKLHDAMGTRSLMIHTFSRCVLCCAEEVDLDELLAGRLVSFLMDHHQEILQVPSYLQTAVEKHLDYLKKGHIENPGDGLFAPLPTYSYCKQISAQEFDEQKVSTSQAAIAELLENIIKNRSLPLKEKRKKLKQFQKEYPLIYQKRFPTTESEAALFGDKPTIKQPMLILRKPKFRSLR

SEQ ID NO: 188 - DNA, 767 bp, Homo sapiens
gctttttttttttcaggcggccgggaagatggcggacattcagactgagcgtgcctaccaaaagcagccgaccatctttcaaaacaagaagagggtcctgctgggagaaactggcaaggagaagctcccgcggtactacaagaacatcggtctgggcttcaagacacccaaggaggctattgagggcacctacattgacaagaaatgccccttcactggtaatgtgtccattcgagggcggatcctctctggcgtggtgaccaagatgaagatgcagaggaccatggtcatccgccgagactatctgcactacatccgcaagtacaaccgcttcgagaagcgccacaagaacatgtctgtacacctgtccccctgcttcagggacgtccagatcggtgacatcgtcacagtgggcgagtgccggcctctgagcaagacagtgcgcttcaacgtgctcaaggtcaccaaggctgccggcaccaagaagcagttccagaagtctgaggcctggaacatcggggcccgcctccccaccaatggaactaacagttcattttcttccatcccctcagaaataataacaagccgacaaaccaaacacattgtttggcgccgctcagcccctcaaaaaatttttcaaaccccttcgtggggccggcgggccccgtggttagtgacaccggtcctaccgtttccagagaaacccgtgccgaacaggggggtttcccccaaaaaaagcgcggggaccggggtttgcacaccaaggt

SEQ ID NO: 189 - DNA, 2120 bp, Homo sapiens
gctgcccgggctgcgcggcgtctgcaggcgccaccgctgcctctttccggctgtgaccctcctcgccggcgccgcttggctgcgtcctccgactccccgcgccgccgagaccaggctcccgctccggttgcggccgcaccgccctccgcggccgccccctggggatccagcgagcgcggtcgtccttggtggaaggaaccatgaactggcatctccccctcttcctcttggcctctgtgacgctgccttccatctgctcccacttcaatcctctgtctctcgaggaactaggctccaacacggggatccaggttttcaatcagattgtgaagtcgaggcctcatgacaacatcgtgatctctccccatgggattgcgtcggtcctggggatgcttcagctgggggcggacggcaggaccaagaagcagctcgccatggtgatgagatacggcgtaaatggagttggtaaaatattaaagaagatcaacaaggccatcgtctccaagaagaataaagacattgtgacagtggctaacgccgtgtttgttaagaatgcctctgaaattgaagtgccttttgttacaaggaacaaagatgtgttccagtgtgaggtccggaatgtgaactttgaggatccagcctctgcctgtgattccatcaatgcatgggttaaaaatgaaaccagggatatgattgacaatctgctgtccccagatcttattgatggtgtgctcaccagactggtcctcgtcaacgcagtgtatttcaagggtctgtggaaatcacggttccaacccgagaacacaaagaaacgcactttcgtggcagccgacgggaaatcctatcaagtgccaatgctggcccagctctccgtgttccggtgtgggtcgacaagtgcccccaatgatttatggtacaacttcattgaactgccctaccacggggaaagcatcagcatgctgattgcactgccgactgagagctccactccgctgtctgccatcatcccacacatcagcaccaagaccatagacagctggatgagcatcatggtgcccaagagggtgcaggtgatcctgcccaagttcacagctgtagcacaaacagatttgaaggagccgctgaaagttcttggcattactgacatgtttgattcatcaaaggcaaattttgcaaaaataacaacagggtcagaaaacctccatgtttctcatatcttgcaaaaagcaaaaattgaagtcagtgaagatggaaccaaagcttcagcagcaacaactgcaattctcattgcaagatcatcgcctccctggtttatagtagacagaccttttctgtttttcatccgacataatcctacaggtgctgtgttattcatggggcagataaacaaaccctgaagagtatacaaaagaaaccatgcaaagcaacgactactttgctacgaagaaagactcctttcctgcatctttcatagttctgttaaatatttttgtacatcgcttctttttcaaaactagttcttaggaacagactcgatgcaagtgtttctgttctgggaggtattggagggaaaaaacagcaggatggctggaacactgtactgaggaatgaatagaaaggcttccagatgtctaaaagattctttaaactactgaactgttacctaggttaacaaccctgttgagtatttgctgtttgtccagttcaggaatttttgttttgttttgtctatatgtgcggcttttcagaagaaatttaatcagtgtgacagaaaaaaaaaatgttttatggtagcttttactttttatgaaaaaaaaattatttgccttttaaattcttttcccccatccccctccaaagtcttgatagcaagcgttattttgggggtagaaacggtgaaatctctagcctctttgtgtttttgttgttgttgttgttgttgttttatataatgcatgtattcactaaaataaaatttaaaaaactcctgtcttgctagacaaggttgctgttgtgcagtgtgcctgtcactactggtctgtactccttggatttgcatttttgtattttgtacaaagtaaaaataaactgttatgagtagtaaaaaaaaaaaaaaaaaa

SEQ ID NO: 190 - protein, 398 aa, Homo sapiens
MNWHLPLFLLASVTLPSICSHFNPLSLEELGSNTGIQVFNQIVKSRPHDNIVISPHGIASVLGMLQLGADGRTKKQLAMVMRYGVNGVGKILKKINKAIVSKKNKDIVTVANAVFVKNASEIEVPFVTRNKDVFQCEVRNVNFEDPASACDSINAWVKNETRDMIDNLLSPDLIDGVLTRLVLVNAVYFKGLWKSRFQPENTKKRTFVAADGKSYQVPMLAQLSVFRCGSTSAPNDLWYNFIELPYHGESISMLIALPTESSTPLSAIIPHISTKTIDSWMSIMVPKRVQVILPKFTAVAQTDLKEPLKVLGITDMFDSSKANFAKITTGSENLHVSHILQKAKIEVSEDGTKASAATTAILIARSSPPWFIVDRPFLFFIRHNPTGAVLFMGQINKP

SEQ ID NO: 191 - DNA, 3444 bp, Homo sapiens
aggctcagcacagagagtggaaaacagcagaggtgacagagcagccgtgctcgaagcgttcctggagcccaagctctcctccacaggtgaagacagggccagcaggagacaccatggggcacctctcagccccacttcacagagtgcgtgtaccctggcaggggcttctgctcacagcctcacttctaaccttctggaacccgcccaccactgcccagctcactactgaatccatgccattcaatgttgcagaggggaaggaggttcttctccttgtccacaatctgccccagcaactttttggctacagctggtacaaaggggaaagagtggatggcaaccgtcaaattgtaggatatgcaataggaactcaacaagctaccccagggcccgcaaacagcggtcgagagacaatataccccaatgcatccctgctgatccagaacgtcacccagaatgacacaggattctacaccctacaagtcataaagtcagatcttgtgaatgaagaagcaactggacagttccatgtatacccggagctgcccaagccctccatctccagcaacaactccaaccctgtggaggacaaggatgctgtggccttcacctgtgaacctgagactcaggacacaacctacctgtggtggataaacaatcagagcctcccggtcagtcccaggctgcagctgtccaatggcaacaggaccctcactctactcagtgtcacaaggaatgacacaggaccctatgagtgtgaaatacagaacccagtgagtgcgaaccgcagtgacccagtcaccttgaatgtcacctatggcccggacacccccaccatttccccttcagacacctattaccgtccaggggcaaacctcagcctctcctgctatgcagcctctaacccacctgcacagtactcctggcttatcaatggaacattccagcaaagcacacaagagctctttatccctaacatcactgtgaataatagtggatcctatacctgccacgccaataactcagtcactggctgcaacaggaccacagtcaagacgatcatagtcactgagctaagtccagtagtagcaaagccccaaatcaaagccagcaagaccacagtcacaggagataaggactctgtgaacctgacctgctccacaaatgacactggaatctccatccgttggttcttcaaaaaccagagtctcccgtcctcggagaggatgaagctgtcccagggcaacaccaccctcagcataaaccctgtcaagagggaggatgctgggacgtattggtgtgaggtcttcaacccaatcagtaagaaccaaagcgaccccatcatgctgaacgtaaactataatgctctaccacaagaaaatggcctctcacctggggccattgctggcattgtgattggagtagtggccctggttgctctgatagcagtagccctggcatgttttctgcatttcgggaagaccggcagctcaggaccactccaatgacccacctaacaagatgaatgaagttacttattctaccctgaactttgaagcccagcaacccacacaaccaacttcagcctccccatccctaacagccacagaaataatttattcagaagtaaaaaagcagtaatgaaacctgtcctgctcactgcagtgctgatgtatttcaagtctctcaccctcatcactaggagattcctttcccctgtaggggtagaggggtggggacagaaacaactttctcctactcttccttcctaataggcatctccaggctgcctggtcactgcccctctctcagtgtcaatagatgaaagtacattgggagtctgtaggaaacccaaccttcttgtcattgaaatttggcaaagctgactttgggaaagagggaccagaacttcccctcccttccccttttcccaacctggacttgttttaaacttgcctgttcagagcactcattccttcccacccccagtcctgtcctatcactctaattcggatttgccatagccttgaggttatgtccttttccattaagtacatgtgccaggaaacaagagagagagaaagtaaaggcagtaatgccttctcctatttctccaaagccttgtgtgaactcaccaaacacaagaaaatcaaatatataaccaatagtgaaatgccacacctttgtccactgtcagggttgtctacctgtaggatcagggtctaagcaccttggtgcttagctagaataccacctaatccttctggcaagcctgtcttcagagaacccactagaagcaactaggaaaatcacttgccaaaatccaaggcaattcctgatggaaaatgcaaaagcacatatatgttttaatatctttatgggctctgttcaaggcagtgctgagagggaggggttatagcttcaggagggaaccagcttctgataaacacaatctgctaggaacttgggaaaggaatcagagagctgcccttcagcgattatttaaattattgttaaagaatacacaatttggggtattgggatttttctccttttctctgagacattccaccattttaatttttgtaactgcttatttatgtgaaaagggttatttttacttagcttagctatgtcagccaatccgattgccttaggtgaaagaaaccaccgaaatccctcaggtcccttggtcaggagcctctcaagattttttttgtcagaggctccaaatagaaaataagaaaaggttttcttcattcatggctagagctagatttaactcagtttctaggcacctcagaccaatcatcaactaccattctattccatgtttgcacctgtgcattttctgtttgcccccattcactttgtcaggaaaccttggcctctgctaaggtgtatttggtccttgagaagtgggagcaccctacagggacactatcactcatgctggtggcattgtttacagctagaaagctgcactggtgctaatgccccttggggaaatggggctgtgaggaggaggattataacttaggcctagcctcttttaacagcctctgaaatttatcttttcttctatggggtctataaatgtatcttataataaaaaggaaggacaggaggaagacaggcaaatgtacttctcacccagtcttctacacagatggaatctctttggggctaagagaaaggttttattctatattgcttacctgatctcatgttaggcctaagaggctttctccaggaggattagcttggagttctctatactcaggtacctctttcagggttttctaaccctgacacggactgtgcatactttccctcatccatgctgtgctgtgttatttaatttttcctggctaagatcatgtctgaattatgtatgaaaattattctatgtttttataataaaaataatatatcagacatcga

SEQ ID NO: 192 - protein, 464 aa, Homo sapiens
MGHLSAPLHRVRVPWQGLLLTASLLTFWNPPTTAQLTTESMPFNVAEGKEVLLLVHNLPQQLFGYSWYKGERVDGNRQIVGYAIGTQQATPGPANSGRETIYPNASLLIQNVTQNDTGFYTLQVIKSDLVNEEATGQFHVYPELPKPSISSNNSNPVEDKDAVAFTCEPETQDTTYLWWINNQSLPVSPRLQLSNGNRTLTLLSVTRNDTGPYECEIQNPVSANRSDPVTLNVTYGPDTPTISPSDTYYRPGANLSLSCYAASNPPAQYSWLINGTFQQSTQELFIPNITVNNSGSYTCHANNSVTGCNRTTVKTIIVTELSPVVAKPQIKASKTTVTGDKDSVNLTCSTNDTGISIRWFFKNQSLPSSERMKLSQGNTTLSINPVKREDAGTYWCEVFNPISKNQSDPIMLNVNYNALPQENGLSPGAIAGIVIGVVALVALIAVALACFLHFGKTGSSGPLQ

SEQ ID NO: 193 - DNA, 3497 bp, Homo sapiens
aggctcagcacagagagtggaaaacagcagaggtgacagagcagccgtgctcgaagcgttcctggagcccaagctctcctccacaggtgaagacagggccagcaggagacaccatggggcacctctcagccccacttcacagagtgcgtgtaccctggcaggggcttctgctcacagcctcacttctaaccttctggaacccgcccaccactgcccagctcactactgaatccatgccattcaatgttgcagaggggaaggaggttcttctccttgtccacaatctgccccagcaactttttggctacagctggtacaaaggggaaagagtggatggcaaccgtcaaattgtaggatatgcaataggaactcaacaagctaccccagggcccgcaaacagcggtcgagagacaatataccccaatgcatccctgctgatccagaacgtcacccagaatgacacaggattctacaccctacaagtcataaagtcagatcttgtgaatgaagaagcaactggacagttccatgtatacccggagctgcccaagccctccatctccagcaacaactccaaccctgtggaggacaaggatgctgtggccttcacctgtgaacctgagactcaggacacaacctacctgtggtggataaacaatcagagcctcccggtcagtcccaggctgcagctgtccaatggcaacaggaccctcactctactcagtgtcacaaggaatgacacaggaccctatgagtgtgaaatacagaacccagtgagtgcgaaccgcagtgacccagtcaccttgaatgtcacctatggcccggacacccccaccatttccccttcagacacctattaccgtccaggggcaaacctcagcctctcctgctatgcagcctctaacccacctgcacagtactcctggcttatcaatggaacattccagcaaagcacacaagagctctttatccctaacatcactgtgaataatagtggatcctatacctgccacgccaataactcagtcactggctgcaacaggaccacagtcaagacgatcatagtcactgagctaagtccagtagtagcaaagccccaaatcaaagccagcaagaccacagtcacaggagataaggactctgtgaacctgacctgctccacaaatgacactggaatctccatccgttggttcttcaaaaaccagagtctcccgtcctcggagaggatgaagctgtcccagggcaacaccaccctcagcataaaccctgtcaagagggaggatgctgggacgtattggtgtgaggtcttcaacccaatcagtaagaaccaaagcgaccccatcatgctgaacgtaaactataatgctctaccacaagaaaatggcctctcacctggggccattgctggcattgtgattggagtagtggccctggttgctctgatagcagtagccctggcatgttttctgcatttcgggaagaccggcagggcaagcgaccagcgtgatctcacagagcacaaaccctcagtctccaaccacactcaggaccactccaatgacccacctaacaagatgaatgaagttacttattctaccctgaactttgaagcccagcaacccacacaaccaacttcagcctccccatccctaacagccacagaaataatttattcagaagtaaaaaagcagtaatgaaacctgtcctgctcactgcagtgctgatgtatttcaagtctctcaccctcatcactaggagattcctttcccctgtaggggtagaggggtggggacagaaacaactttctcctactcttccttcctaataggcatctccaggctgcctggtcactgcccctctctcagtgtcaatagatgaaagtacattgggagtctgtaggaaacccaaccttcttgtcattgaaatttggcaaagctgactttgggaaagagggaccagaacttcccctcccttccccttttcccaacctggacttgttttaaacttgcctgttcagagcactcattccttcccacccccagtcctgtcctatcactctaattcggatttgccatagccttgaggttatgtccttttccattaagtacatgtgccaggaaacaagagagagagaaagtaaaggcagtaatgccttctcctatttctccaaagccttgtgtgaactcaccaaacacaagaaaatcaaatatataaccaatagtgaaatgccacacctttgtccactgtcagggttgtctacctgtaggatcagggtctaagcaccttggtgcttagctagaataccacctaatccttctggcaagcctgtcttcagagaacccactagaagcaactaggaaaatcacttgccaaaatccaaggcaattcctgatggaaaatgcaaaagcacatatatgttttaatatctttatgggctctgttcaaggcagtgctgagagggaggggttatagcttcaggagggaaccagcttctgataaacacaatctgctaggaacttgggaaaggaatcagagagctgcccttcagcgattatttaaattattgttaaagaatacacaatttggggtattgggatttttctccttttctctgagacattccaccattttaatttttgtaactgcttatttatgtgaaaagggttatttttacttagcttagctatgtcagccaatccgattgccttaggtgaaagaaaccaccgaaatccctcaggtcccttggtcaggagcctctcaagattttttttgtcagaggctccaaatagaaaataagaaaaggttttcttcattcatggctagagctagatttaactcagtttctaggcacctcagaccaatcatcaactaccattctattccatgtttgcacctgtgcattttctgtttgcccccattcactttgtcaggaaaccttggcctctgctaaggtgtatttggtccttgagaagtgggagcaccctacagggacactatcactcatgctggtggcattgtttacagctagaaagctgcactggtgctaatgccccttggggaaatggggctgtgaggaggaggattataacttaggcctagcctcttttaacagcctctgaaatttatcttttcttctatggggtctataaatgtatcttataataaaaaggaaggacaggaggaagacaggcaaatgtacttctcacccagtcttctacacagatggaatctctttggggctaagagaaaggttttattctatattgcttacctgatctcatgttaggcctaagaggctttctccaggaggattagcttggagttctctatactcaggtacctctttcagggttttctaaccctgacacggactgtgcatactttccctcatccatgctgtgctgtgttatttaatttttcctggctaagatcatgtctgaattatgtatgaaaattattctatgtttttataataaaaataatatatcagacatcga

SEQ ID NO: 194 - protein, 526 aa, Homo sapiens
MGHLSAPLHRVRVPWQGLLLTASLLTFWNPPTTAQLTTESMPFNVAEGKEVLLLVHNLPQQLFGYSWYKGERVDGNRQIVGYAIGTQQATPGPANSGRETIYPNASLLIQNVTQNDTGFYTLQVIKSDLVNEEATGQFHVYPELPKPSISSNNSNPVEDKDAVAFTCEPETQDTTYLWWINNQSLPVSPRLQLSNGNRTLTLLSVTRNDTGPYECEIQNPVSANRSDPVTLNVTYGPDTPTISPSDTYYRPGANLSLSCYAASNPPAQYSWLINGTFQQSTQELFIPNITVNNSGSYTCHANNSVTGCNRTTVKTIIVTELSPVVAKPQIKASKTTVTGDKDSVNLTCSTNDTGISIRWFFKNQSLPSSERMKLSQGNTTLSINPVKREDAGTYWCEVFNPISKNQSDPIMLNVNYNALPQENGLSPGAIAGIVIGVVALVALIAVALACFLHFGKTGRASDQRDLTEHKPSVSNHTQDHSNDPPNKMNEVTYSTLNFEAQQPTQPTSASPSLTATEIIYSEVKKQ

SEQ ID NO: 195 - DNA, 1252 bp, Homo sapiens
accggaaacttaggggccacgtgagccacggccacggccgcataggcaagcaccggaagcaccccggcggccgcggtaatgctggtggtctgcatcaccaccggatcaacttcgacaaataccacccaggctactttgggaaagctggtcatgaagcattaccacttaaagaggaaccagagcttctgcccaagtgtcaaccttgacacaatgtggactttggtcagtgaacagacacgggtgaatgctgctaaaaacaagactggggctgctcccatcattgatgtggtgcgatcgggctactacaaagttctgggaaagggacagctcccaaagcagcctgtcatcgtgaaggccaaattcttcagcagaagagctgaggagaagattaagagtgtcggggtgtggcctgtgtcctggtggcttgacagccacatggagggagtcccagttcaaatgctacaactacttcaagaaccacaaccaaaaacaccacatccagcggccaccacagagccgggctgcccgcaaacaccagggcaatggaacatgggcccttgggccacaagcttgtgccctgggcccccagacatacgtggggccgcaacggtggacacacacgtcccgggacaccccacaaaaaggcagaagccagaaataacagtaccgcgaatacacccaacgggtcacccccgtgcacatcaagatctgcccggggacacacagcagcacagaccagaagcacacacacacagccggagacgcggagcacagagaacagcaggccaaagcaccagcacagacagacggcaggcagagcaagcacggcaccaaagagaagcgacagggagcagagcaaagcgtggcacgagacggagagagacagagcacagcgccaagaaaaccaagaacaacccaacagaccaaggacgaacgaaaaaagagacaagggaaggaggcaggaggacggagcaaggacgaggagcacggcagaacggacgggagagcaggacacaagaagactgacggaaaagaccaaggcggaacgggaagagaggacacgcgcgagacagacgagagctgaggggaaaaaaagagacgcagagcaggcgagagaaagagacacaaaggagcgagggagacggaaccgagaacaggaagcaggagagagataggcgcggagaccggaaccacaagcaccagaagcggagaaagcaggagaggagcagtggaaggagaagcaaaggaggag

SEQ ID NO: 196 - DNA, 1147 bp, Homo sapiens
accaaatcaaccataggtccaagaacaattgtctctggacggcagctatgcgactcaccgtgctgtgtgctgtgtgcctgctgcctggcagcctggccctgccgctgcctcaggaggcgggaggcatgagtgagctacagtgggaacaggctcaggactatctcaagagattttatctctatgactcagaaacaaaaaatgccaacagtttagaagccaaactcaaggagatgcaaaaattctttggcctacctataactggaatgttaaactcccgcgtcatagaaataatgcagaagcccagatgtggagtgccagatgttgcagaatactcactatttccaaatagcccaaaatggacttccaaagtggtcacctacaggatcgtatcatatactcgagacttaccgcatattacagtggatcgattagtgtcaaaggctttaaacatgtggggcaaagagatccccctgcatttcaggaaagttgtatggggaactgctgacatcatgattggctttgcgcgaggagctcatggggactcctacccatttgatgggccaggaaacacgctggctcatgcctttgcgcctgggacaggtctcggaggagatgctcacttcgatgaggatgaacgctggacggatggtagcagtctagggattaacttcctgtatgctgcaactcatgaacttggccattctttgggtatgggacattcctctgatcctaatgcagtgatgtatccaacctatggaaatggagatccccaaaattttaaactttcccaggatgatattaaaggcattcagaaactatatggaaagagaagtaattcaagaaagaaatagaaacttcaggcagaacatccattcattcattcattggattgtatatcattgttgcacaatcagaattgataagcactgttcctccactccatttagcaattatgtcacccttttttattgcagttggtttttgaatgtctttcactccttttaaggataaactcctttatggtgtgactgtgtcttattcatctatacttgcagtgggtagatgtcaataaatgttacatacacaaataaataaaatgtttattccatggtaaatttaaaaaaaaaaaaaaaaaaaaaaaaaaaaa

SEQ ID NO: 197 - protein, 267 aa, Homo sapiens
MRLTVLCAVCLLPGSLALPLPQEAGGMSELQWEQAQDYLKRFYLYDSETKNANSLEAKLKEMQKFFGLPITGMLNSRVIEIMQKPRCGVPDVAEYSLFPNSPKWTSKVVTYRIVSYTRDLPHITVDRLVSKALNMWGKEIPLHFRKVVWGTADIMIGFARGAHGDSYPFDGPGNTLAHAFAPGTGLGGDAHFDEDERWTDGSSLGINFLYAATHELGHSLGMGHSSDPNAVMYPTYGNGDPQNFKLSQDDIKGIQKLYGKRSNSRKK

SEQ ID NO: 198 - DNA, 1487 bp, Homo sapiens
cgaaacagtagaggtgacagagcagccgtgctcgaagcgttcctggagcccaagctctcctccacaggtgaagacagggccagcaggagacaccatggggcacctctcagccccacttcacagagtgcgtgtaccctggcaggggcttctgctcacagcctcacttctaaccttctggaacccgcccaccactgcccagctcactactgaatccatgccattcaatgttgcagaggggaaggaggttcttctccttgtccacaatctgccccagcaactttttggctacagctggtacaaaggggaaagagtggatggcaaccgtcaaattgtaggatatgcaataggaactcaacaagctaccccagggcccgcaaacagcggtcgagagacaatataccccaatgcatccctgctgatccagaacgtcacccagaatgacacaggattctacaccctacaagtcataaagtcagatcttgtgaatgaagaagcaactggacagttccatgtatacccggagctgcccaagccctccatctccagcaacaactccaaccctgtggaggacaaggatgctgtggccttcacctgtgaacctgagactcaggacacaacctacctgtggtggataaacaatcagagcctcccggtcagtcccaggctgcagctgtccaatggcaacaggaccctcactctactcagtgtcacaaggaatgacacaggaccctatgagtgtgaaatacagaacccagtgagtgcgaaccgcagtgacccagtcaccttgaatgtcacctatggcccggacacccccaccatttccccttcatacacctattaccgtccaggggcaaacctcagcctctcctgctatgcagcctctaacccacctgcacagtactcctggcttatcaatggaacattccagcaaagcacacaagagctctttatccctaacatcactgtgaataatagtggatcctatacctgccacgccaataactcagtcactggctgcaacaggaccacagtcaagacgatcatagtcactgagagacagaatctcaccatgttgcccgggctggactcgaactcctgggctcaagcaatcctcccatctgtttcccaaagtgctgagattacagataatgctctaccacaagaaaatggcctctcacctggggccattgctggcattgtgattggagtagtggccctggttgctctgatagcagtagccctggcatgttttctgcatttcgggaagaccggcagggcaagcgaccagcgtgatctcacagagcacaaaccctcagtgtccaaccacactcaggaccactccaatgacccacctaacaagatgaatgaagttacttattctaccctgaactttgaagcccagcaacccacacaaccaacttcagcctccccatccctaacagccacagaaataatttattcagaagtaaaaaagcagtaatgaaacg

SEQ ID NO: 199 - protein, 461 aa, Homo sapiens [sequence omitted]

SEQ ID NO: 200 - DNA, 1825 bp, Homo sapiens
ccaagaggtgggaacaatctaaatgtccaacagatgaatgaatttttaaaaagtggtatatatacatacattgagatattattcagccttaaaaaagaagaaaaatcatggccgggcgcggtggctcacgcctgtaatcccagcactttgggaggccgagacgagcgaatcacgaggtcaggagatggagaccatcctcattaacatggtgaaactctgtctctactaaaaatacaaaaaaattagccgggtttagtggtgggcgcctgtagtcccagctactcaggaggctgaggcaggagaatggcatgaacccgggaggcggagcttgcagtgagccgagatcgcgccactgcactccagcctgggcgacagagcgagactccgtctgaaaaaaaaaaaaagggaaaaatcctgccacatgatatggtatgggtcaaacttgaagacattaagctaaataaaatgtcagtcacaaaaagacaaatattatatgattccactcacatgaagtatcaagtaatcaaactcacagaaaaagaaagtaaaattgtggttgccaatggttcagggtgaaaaaaagggagttagtgtttaatgggtaagaggttcagtttcgcaagacaaaagatttctggatatttgttgcacaacagtatgagtataattaatgctacagaactgttagaaaagagtctctttcagatttagatactagaaaatgtatgagtaaaatacgatgtctgaaatttgctttcaaataatctgaaggctggttggggaagttgttggagtcatacatgaaataaaactggtattagttgacaatccttaaaactgagtgggtttattataccattctctctctacttttgtgtatgtttgaaattttccatcataaaggagtttttaaaaacccaacattatcaaaatgaaaaataatcaatacaagtgctggataagaaagtcaaggaaatatcacagaatgtataatttaaaagatttgctgaggtgtgtgtatcacctgagctcaggagttcgagactagcctggccaaaatggcataaccccatctctacataaaatacaaaaatcagctgggaacactggtgcacacctgtagtctcagctactcaggaggctgagacacgagaatcacttgaacccaggaggcagaggttgcagtgagctgagatcacgccattgcactccagcctgggtgacagagacagactctgcttggtcacttttttggcggaggagaatgcagttaaaaaggacatgtccccggggattcgactacacttctcaaagtgtactgctggccctctgtatccatgggttctgcatctgtagattcgatcaactcaactcctggctcaatactgatggaagtaatctgcttaacaatctcagaaggactgtgcaagtcaatgagtcgcttgtgaattctcatctggaaacgatcccacgtcttagaaccttcaccacaaggagtttttcttgtagtgattctcaaagtcttggtaggcattcgaactggtcctttcactttgagattcttttcttttgcgcctcttatcaagtcagcacacaccttttccaaggattttacgttgcggcttgttagggtgattcgaattcggtgaattgccacctccggctccacgggtgtttttccggtatccttaaaagccatggctgttgcgcgcgggcttcctgaccgacttgttcctcggcgagagcgaacagcggtgagtcaggagcaggagcgtgcggaccaaaaatcctcagcccttacgaccgcgtcttcctcaaaaaaaaa

SEQ ID NO: 201 - DNA, 1224 bp, Homo sapiens
gcccattgtttttgtaatctctgaggagaagcagcagcaaacatttgctagtcagacaagtgacagggaatggattccaaacaccagtgtgtaaagctaaatgatggccacttcatgcctgtattgggatttggcacctatgcacctccagaggttccgagaagtaaagctttggaggtcacaaaattagcaatagaagctgggttccgccatatagattctgctcatttatacaataatgaggagcaggttggactggccatccgaagcaagattgcagatggcagtgtgaagagagaagacatattctacacttcaaagctttggtccacttttcatcgaccagagttggtccgaccagccttggaaaactcactgaagaaagctcaattggactatgttgacctctatcttattcattctccaatgtctctaaagccaggtgaggaactttcaccaacagatgaaaatggaaaagtaatatttgacatagtggatctctgtaccacctgggaggccatggagaagtgtaaggatgcaggattggccaagtccattggggtgtcaaacttcaaccgcaggcagctggagatgatcctcaacaagccaggactcaagtacaagcctgtctgcaaccaggtagaatgtcatccgtatttcaaccggagtaaattgctagatttctgcaagtcgaaagatattgttctggttgcctatagtgctctgggatctcaacgagacaaacgatgggtggacccgaactccccggtgctcttggaggacccagtcctttgtgccttggcaaaaaagcacaagcgaaccccagccctgattgccctgcgctaccagctgcagcgtggggttgtggtcctggccaagagctacaatgagcagcgcatcagacagaacgtgcaggtttttgagttccagttgactgcagaggacatgaaagccatagatggcctagacagaaatctccactattttaacagtgatagttttgctagccaccctaattatccatattcagatgaatattaacatggagggctttgcctgatgtctaccagaagccctgtgtgtggatggtgacgcagaggacgtctctatgccggtgactggacatatcacctctacttaaatccgtcctgtttagcgacttcagtcaactacagctgagtccataggccagaaagacaataaatttttatcattttgaaataa

SEQ ID NO: 202 - protein, 323 aa, Homo sapiens
MDSKHQCVKLNDGHFMPVLGFGTYAPPEVPRSKALEVTKLAIEAGFRHIDSAHLYNNEEQVGLAIRSKIADGSVKREDIFYTSKLWSTFHRPELVRPALENSLKKAQLDYVDLYLIHSPMSLKPGEELSPTDENGKVIFDIVDLCTTWEAMEKCKDAGLAKSIGVSNFNRRQLEMILNKPGLKYKPVCNQVECHPYFNRSKLLDFCKSKDIVLVAYSALGSQRDKRWVDPNSPVLLEDPVLCALAKKHKRTPALIALRYQLQRGVVVLAKSYNEQRIRQNVQVFEFQLTAEDMKAIDGLDRNLHYFNSDSFASHPNYPYSDEY

SEQ ID NO: 203 - DNA, 307 bp, Homo sapiens
gcacgagcttgttccacctcagctcccatctaaccaccacgtaggggctccctggcacatttcagaggccaccctggcacagcggcctccagcacctgccccgcagccccctccatgcagcgcctgcccctgctacgaatgctatgccgctgcagggaaagctggcgaggacagagccacggtaggaacagccaggccatcagcagacgtgcgagtcaggacacaggccacacagcaaaaccacatactcctaggaaaccgttggtcctaacactccacccacacgcaggtttatttccatcttcca

SEQ ID NO: 204 - DNA, 2357 bp, Homo sapiens
aggagcaaaggcgccatggctgtggagtcccagggcggacgcccacttgtcctgggcctgctgctgtgtgtgctgggcccagtggtgtcccatgctgggaagatactgttgatcccagtggatggcagccactggctgagcatgcttggggccatccagcagctgcagcagaggggacatgaaatagttgtcctagcacctgacgcctcgttgtacatcagagacggagcattttacaccttgaagacgtaccctgtgccattccaaagggaggatgtgaaagagtcttttgttagtctcgggcataatgtttttgagaatgattctttcctgcagcgtgtgatcaaaacatacaagaaaataaaaaaggactctgctatgcttttgtctggctgttcccacttactgcacaacaaggagctcatggcctccctggcagaaagcagctttgatgtcatgctgacggaccctttccttccttgcagccccatcgtggcccagtacctgtctctgcccactgtattcttcttgcatgcactgccatgcagcctggaatttgaggctacccagtgccccaacccattctcctacgtgcccaggcctctctcctctcattcagatcacatgaccttcctgcagcgggtgaagaacatgctcattgccttttcacagaactttctgtgcgacgtggtttattccccgtatgcaacccttgcctcagaattccttcagagagaggtgactgtccaggacctattgagctctgcatctgtctggctgtttagaagtgactttgtgaaggattaccctaggcccatcatgcccaatatggtttttgttggtggaatcaactgccttcaccaaaatccactatcccaggaatttgaagcctacattaatgcttctggagaacatggaattgtggttttctctttgggatcaatggtctcagaaattccagagaagaaagctatggcaattgctgatgctttgggcaaaatccctcagacagtcctgtggcggtacactggaacccgaccatcgaatcttgcgaacaacacgatacttgttaagtggctaccccaaaacgatctgcttggtcacccgatgacccgtgcctttatcacccatgctggttcccatggtgtttatgaaagcatatgcaatggcgttcccatggtgatgatgcccttgtttggtgatcagatggacaatgcaaagcgcatggagactaagggagctggagtgaccctgaatgttctggaaatgacttctgaagatttagaaaatgctctaaaagcagtcatcaatgacaaaagttacaaggagaacatcatgcgcctctccagccttcacaaggaccgcccggtggagccgctggacctggccgtgttctgggtggagtttgtgatgaggcacaagggcgcgccacacctgcgccccgcagcccacgacctcacctggtaccagtaccattccttggacgtgattggtttcctcttggccgtcgtgctgacagtggccttcatcacctttaaatgttgtgcttatggctaccggaaatgcttggggaaaaaagggcgagttaagaaagcccacaaatccaagacccattgagaagtgggtgggaaataaggtaaaattttgaaccattccctagtcatttccaaacttgaaaacagaatcagtgttaaattcattttattcttattaaggaaatactttgcataaattaatcagccccagagtgctttaaaaaattctcttaaataaaaataatagactcgctagtcagtaaagatatttgaatatgtatcgtgccccctctggtgtctttgatcaggatgacatgtgccatttttcagaggacgtgcagacaggctggcattctagattacttttcttactctgaaacatggcctgtttgggagtgcgggattcaaaggtggtcccacggctgcccctactgcaaatggcagttttaatcttatcttttggcttctgcagatggttgcaattgatccttaaccaataatggtcagtcctcatctctgtcgtgcttcataggtgccaccttgtgtgtttaaagaagggaagctttgtacctttagagtgtaggtgaaatgaatgaatggcttggagtgcactgagaacagcatatgatttcttgctttggggaaaaagaatgatgctatgaaattggtgggtggtgtatttgagaagataatcattgcttatgtcaaatggagctgaatttgataaaaacccaaaatacagctatgaagtgctgggcaagtttactttttttctgatgtttcctacaactaaaaataaattaataaatttatataaattct

SEQ ID NO: 205 - protein, 533 aa, Homo sapiens
MAVESQGGRPLVLGLLLCVLGPVVSHAGKILLIPVDGSHWLSMLGAIQQLQQRGHEIVVLAPDASLYIRDGAFYTLKTYPVPFQREDVKESFVSLGHNVFENDSFLQRVIKTYKKIKKDSAMLLSGCSHLLHNKELMASLAESSFDVMLTDPFLPCSPIVAQYLSLPTVFFLHALPCSLEFEATQCPNPFSYVPRPLSSHSDHMTFLQRVKNMLIAFSQNFLCDVVYSPYATLASEFLQREVTVQDLLSSASVWLFRSDFVKDYPRPIMPNMVFVGGINCLHQNPLSQEFEAYINASGEHGIVVFSLGSMVSEIPEKKAMAIADALGKIPQTVLWRYTGTRPSNLANNTILVKWLPQNDLLGHPMTRAFITHAGSHGVYESICNGVPMVMMPLFGDQMDNAKRMETKGAGVTLNVLEMTSEDLENALKAVINDKSYKENIMRLSSLHKDRPVEPLDLAVFWVEFVMRHKGAPHLRPAAHDLTWYQYHSLDVIGFLLAVVLTVAFITFKCCAYGYRKCLGKKGRVKKAHKSKTH

SEQ ID NO: 206 - DNA, 2435 bp, Homo sapiens
gaaaagcagtggtttgtttagggaaaatacctaggagccctgtgatttggagagtgaaaactctttattaccgttgttactttaactctttccaggatggcctgcctccttcgctcatttcagagaatttctgcaggggttttcttcttagcactttggggcatggttgtaggtgacaagctgctggtggtccctcaggacggaagccactggcttagtatgaaggatatagttgaggttctcagtgaccggggtcatgagattgtagtggtggtgcctgaagttaatttgcttttgaaagaatccaaatactacacaagaaaaatctatccagtgccgtatgaccaagaagagctgaagaaccgttaccaatcatttggaaacaatcactttgctgagcgatcattcctaactgctcctcagacagagtacaggaataacatgattgttattggcctgtacttcatcaactgccagagcctcctgcaggacagggacaccctgaacttctttaaggagagcaagtttgatgctcttttcacagacccagccttaccctgtggggtgatcctggctgagtatttgggcctaccatctgtgtacctcttcaggggttttccgtgttccctggagcatacattcagcagaagcccagaccctgtgtcctacattcccaggtgctacacaaagttttcagaccacatgactttttcccaacgagtggccaacttccttgttaatttgttggagccctatctattttattgtctgttttcaaagtatgaagaactcgcatcagctgtcctcaagagagatgtggatataatcaccttatatcagaaggtctctgtttggctgttaagatatgactttgtgcttgaatatcctaggccggtcatgcccaacatggtcttcattggaggtatcaactgtaagaagaggaaagacttgtctcaggaatttgaagcctacattaatgcttctggagaacatggaattgtggttttctctttgggatcaatggtctcagaaattccagagaagaaagctatggcaattgctgatgctttgggcaaaatccctcagacagtcctgtggcggtacactggaacccgaccatcgaatcttgcgaacaacacgatacttgttaagtggctaccccaaaacgatctgcttggtcacccgatgacccgtgcctttatcacccatgctggttcccatggtgtttatgaaagcatatgcaatggcgttcccatggtgatgatgcccttgtttggtgatcagatggacaatgcaaagcgcatggagactaagggagctggagtgaccctgaatgttctggaaatgacttctgaagatttagaaaatgctctaaaagcagtcatcaatgacaaaagttacaaggagaacatcatgcgcctctccagccttcacaaggaccgcccggtggagccgctggacctggccgtgttctgggtggagtttgtgatgaggcacaagggcgcgccacacctgcgccccgcagcccacgacctcacctggtaccagtaccattccttggacgtgattggtttcctcttggccgtcgtgctgacagtggccttcatcacctttaaatgttgtgcttatggctaccggaaatgcttggggaaaaaagggcgagttaagaaagcccacaaatccaagacccattgagaagtgggtgggaaataaggtaaaattttgaaccattccctagtcatttccaaacttgaaaacagaatcagtgttaaattcattttattcttattaaggaaatactttgcataaattaatcagccccagagtgctttaaaaaattctcttaaataaaaataatagactcgctagtcagtaaagatatttgaatatgtatcgtgccccctctggtgtctttgatcaggatgacatgtgccatttttcagaggacgtgcagacaggctggcattctagattacttttcttactctgaaacatggcctgtttgggagtgcgggattcaaaggtggtcccacggctgcccctactgcaaatggcagttttaatcttatcttttggcttctgcagatggttgcaattgatccttaaccaataatggtcagtcctcatctctgtcgtgcttcataggtgccaccttgtgtgtttaaagaagggaagctttgtacctttagagtgtaggtgaaatgaatgaatggcttggagtgcactgagaacagcatatgatttcttgctttggggaaaaagaatgatgctatgaaattggtgggtggtgtatttgagaagataatcattgcttatgtcaaatggagctgaatttgataaaaacccaaaatacagctatgaagtgctgggcaagtttactttttttctgatgtttcctacaactaaaaataaattaataaatttatataaattct

SEQ ID NO: 207 - protein, 532 aa, Homo sapiens
MACLLRSFQRISAGVFFLALWGMVVGDKLLVVPQDGSHWLSMKDIVEVLSDRGHEIVVVVPEVNLLLKESKYYTRKIYPVPYDQEELKNRYQSFGNNHFAERSFLTAPQTEYRNNMIVIGLYFINCQSLLQDRDTLNFFKESKFDALFTDPALPCGVILAEYLGLPSVYLFRGFPCSLEHTFSRSPDPVSYIPRCYTKFSDHMTFSQRVANFLVNLLEPYLFYCLFSKYEELASAVLKRDVDIITLYQKVSVWLLRYDFVLEYPRPVMPNMVFIGGINCKKRKDLSQEFEAYINASGEHGIVVFSLGSMVSEIPEKKAMAIADALGKIPQTVLWRYTGTRPSNLANNTILVKWLPQNDLLGHPMTRAFITHAGSHGVYESICNGVPMVMMPLFGDQMDNAKRMETKGAGVTLNVLEMTSEDLENALKAVINDKSYKENIMRLSSLHKDRPVEPLDLAVFWVEFVMRHKGAPHLRPAAHDLTWYQYHSLDVIGFLLAVVLTVAFITFKCCAYGYRKCLGKKGRVKKAHKSKTH

SEQ ID NO: 208 - DNA, 2374 bp, Homo sapiens
acagtcagctgtcggtggcttctgctgagatggccagaggactccaggttcccctgccgcggctggccacaggactgctgctcctcctcagtgtccagccctgggctgagagtggaaaggtgttggtggtgcccactgatggcagcccctggctcagcatgcgggaggccttgcgggagctccatgccagaggccaccaggcggtggtcctcaccccagaggtgaatatgcacatcaaagaagagaaatttttcaccctgacagcctatgctgttccatggacccagaaggaatttgatcgcgttacgctgggctacactcaagggttctttgaaacagaacatcttctgaagagatattctagaagtatggcaattatgaacaatgtatctttggcccttcataggtgttgtgtggagctactgcataatgaggccctgatcaggcacctgaatgctacttcctttgatgtggttttaacagaccccgttaacctctgtggggcggtgctggctaagtacctgtcgattcctgctgtgtttttttggaggtacattccatgtgacttagactttaagggcacacagtgtccaaatccttcctcctatattcctaagttactaacgaccaattcagaccacatgacattcctgcaaagggtcaagaacatgctctaccctctggccctgtcctacatttgccatactttttctgccccttatgcaagtcttgcctctgagctttttcagagagaggtgtcagtggtggatcttgtcagctatgcatccgtgtggctgttccgaggggactttgtgatggactaccccaggccgatcatgcccaacatggtcttcattgggggcatcaactgtgccaacgggaagccactatctcaggaatttgaagcctacattaatgcttctggagaacatggaattgtggttttctctttgggatcaatggtctcagaaattccagagaagaaagctatggcaattgctgatgctttgggcaaaatccctcagacagtcctgtggcggtacactggaacccgaccatcgaatcttgcgaacaacacgatacttgttaagtggctaccccaaaacgatctgcttggtcacccgatgacccgtgcctttatcacccatgctggttcccatggtgtttatgaaagcatatgcaatggcgttcccatggtgatgatgcccttgtttggtgatcagatggacaatgcaaagcgcatggagactaagggagctggagtgaccctgaatgttctggaaatgacttctgaagatttagaaaatgctctaaaagcagtcatcaatgacaaaagttacaaggagaacatcatgcgcctctccagccttcacaaggaccgcccggtggagccgctggacctggccgtgttctgggtggagtttgtgatgaggcacaagggcgcgccacacctgcgccccgcagcccacgacctcacctggtaccagtaccattccttggacgtgattggtttcctcttggccgtcgtgctgacagtggccttcatcacctttaaatgttgtgcttatggctaccggaaatgcttggggaaaaaagggcgagttaagaaagcccacaaatccaagacccattgagaagtgggtgggaaataaggtaaaattttgaaccattccctagtcatttccaaacttgaaaacagaatcagtgttaaattcattttattcttattaaggaaatactttgcataaattaatcagccccagagtgctttaaaaaattctcttaaataaaaataatagactcgctagtcagtaaagatatttgaatatgtatcgtgccccctctggtgtctttgatcaggatgacatgtgccatttttcagaggacgtgcagacaggctggcattctagattacttttcttactctgaaacatggcctgtttgggagtgcgggattcaaaggtggtcccacggctgcccctactgcaaatggcagttttaatcttatcttttggcttctgcagatggttgcaattgatccttaaccaataatggtcagtcctcatctctgtcgtgcttcataggtgccaccttgtgtgtttaaagaagggaagctttgtacctttagagtgtaggtgaaatgaatgaatggcttggagtgcactgagaacagcatatgatttcttgctttggggaaaaagaatgatgctatgaaattggtgggtggtgtatttgagaagataatcattgcttatgtcaaatggagctgaatttgataaaaacccaaaatacagctatgaagtgctgggcaagtttactttttttctgatgtttcctacaactaaaaataaattaataaatttatataaattct

SEQ ID NO: 209 - protein, 534 aa, Homo sapiens
MARGLQVPLPRLATGLLLLLSVQPWAESGKVLVVPTDGSPWLSMREALRELHARGHQAVVLTPEVNMHIKEEKFFTLTAYAVPWTQKEFDRVTLGYTQGFFETEHLLKRYSRSMAIMNNVSLALHRCCVELLHNEALIRHLNATSFDVVLTDPVNLCGAVLAKYLSIPAVFFWRYIPCDLDFKGTQCPNPSSYIPKLLTTNSDHMTFLQRVKNMLYPLALSYICHTFSAPYASLASELFQREVSVVDLVSYASVWLFRGDFVMDYPRPIMPNMVFIGGINCANGKPLSQEFEAYINASGEHGIVVFSLGSMVSEIPEKKAMAIADALGKIPQTVLWRYTGTRPSNLANNTILVKWLPQNDLLGHPMTRAFITHAGSHGVYESICNGVPMVMMPLFGDQMDNAKRMETKGAGVTLNVLEMTSEDLENALKAVINDKSYKENIMRLSSLHKDRPVEPLDLAVFWVEFVMRHKGAPHLRPAAHDLTWYQYHSLDVIGFLLAVVLTVAFITFKCCAYGYRKCLGKKGRVKKAHKSKTH

SEQ ID NO: 210 - DNA, 2399 bp, Homo sapiens
atagcagcttagaatcccagctgctggctcgggctgcagttctctcatggctcgcgcagggtggaccagccccgttcctttatgtgtgtgtctactgctgacctgtggctttgccgaggcagggaagctgctggtagtgcccatggatgggagtcactggttcaccatgcagtcggtggtggagaaacttatcctcagggggcatgaggtggttgtagtcatgccagaggtgagttggcaactggaaagatcactgaattgcacagtgaagacttactcaacctcgtacactctggaagatcagaaccgggaattcatggttttcgcccatgctcaatggaaagcacaggcacaaagtatattttctctattaatgagttcatccagtggttttcttgacttatttttttcgcattgcaggagtttgtttaatgaccgaaaattagtagaatacttaaaggagagttcttttgatgcagtgtttctggatccttttgatacctgtggcttaattgttgctaaatatttctccctcccctctgtggtcttcaccaggggaatattttgccaccatcttgaagaaggtgcacagtgccctgctcctctttcctatgtccccaatgatctcttagggttctcagatgccatgactttcaaggagagagtatggaaccacatcgtgcacttggaggaccatttattttgccagtatctttttagaaatgccctagaaatagcctctgaaattctccaaacccctgtcacggcatatgatctctacagtcacacatcaatttggttgttgcgaacggactttgttttggactatcccaaacccgtgatgcccaacatgatcttcattggtggtatcaactgtcatcagggaaagccattgcctatggaatttgaagcctacattaatgcttctggagaacatggaattgtggttttctctttgggatcaatggtctcagaaattccagagaagaaagctatggcaattgctgatgctttgggcaaaatccctcagacagtcctgtggcggtacactggaacccgaccatcgaatcttgcgaacaacacgatacttgttaagtggctaccccaaaacgatctgcttggtcacccgatgacccgtgcctttatcacccatgctggttcccatggtgtttatgaaagcatatgcaatggcgttcccatggtgatgatgcccttgtttggtgatcagatggacaatgcaaagcgcatggagactaagggagctggagtgaccctgaatgttctggaaatgacttctgaagatttagaaaatgctctaaaagcagtcatcaatgacaaaagttacaaggagaacatcatgcgcctctccagccttcacaaggaccgcccggtggagccgctggacctggccgtgttctgggtggagtttgtgatgaggcacaagggcgcgccacacctgcgccccgcagcccacgacctcacctggtaccagtaccattccttggacgtgattggtttcctcttggccgtcgtgctgacagtggccttcatcacctttaaatgttgtgcttatggctaccggaaatgcttggggaaaaaagggcgagttaagaaagcccacaaatccaagacccattgagaagtgggtgggaaataaggtaaaattttgaaccattccctagtcatttccaaacttgaaaacagaatcagtgttaaattcattttattcttattaaggaaatactttgcataaattaatcagccccagagtgctttaaaaaattctcttaaataaaaataatagactcgctagtcagtaaagatatttgaatatgtatcgtgccccctctggtgtctttgatcaggatgacatgtgccatttttcagaggacgtgcagacaggctggcattctagattacttttcttactctgaaacatggcctgtttgggagtgcgggattcaaaggtggtcccacggctgcccctactgcaaatggcagttttaatcttatcttttggcttctgcagatggttgcaattgatccttaaccaataatggtcagtcctcatctctgtcgtgcttcataggtgccaccttgtgtgtttaaagaagggaagctttgtacctttagagtgtaggtgaaatgaatgaatggcttggagtgcactgagaacagcatatgatttcttgctttggggaaaaagaatgatgctatgaaattggtgggtggtgtatttgagaagataatcattgcttatgtcaaatggagctgaatttgataaaaacccaaaatacagctatgaagtgctgggcaagtttactttttttctgatgtttcctacaactaaaaataaattaataaatttatataaattctatttaaaaaaaaaaaaaaaa

SEQ ID NO: 211 - protein, 530 aa, Homo sapiens
MARAGWTSPVPLCVCLLLTCGFAEAGKLLVVPMDGSHWFTMQSVVEKLILRGHEVVVVMPEVSWQLERSLNCTVKTYSTSYTLEDQNREFMVFAHAQWKAQAQSIFSLLMSSSSGFLDLFFSHCRSLFNDRKLVEYLKESSFDAVFLDPFDTCGLIVAKYFSLPSVVFTRGIFCHHLEEGAQCPAPLSYVPNDLLGFSDAMTFKERVWNHIVHLEDHLFCQYLFRNALEIASEILQTPVTAYDLYSHTSIWLLRTDFVLDYPKPVMPNMIFIGGINCHQGKPLPMEFEAYINASGEHGIVVFSLGSMVSEIPEKKAMAIADALGKIPQTVLWRYTGTRPSNLANNTILVKWLPQNDLLGHPMTRAFITHAGSHGVYESICNGVPMVMMPLFGDQMDNAKRMETKGAGVTLNVLEMTSEDLENALKAVINDKSYKENIMRLSSLHKDRPVEPLDLAVFWVEFVMRHKGAPHLRPAAHDLTWYQYHSLDVIGFLLAVVLTVAFITFKCCAYGYRKCLGKKGRVKKAHKSKTH

SEQ ID NO: 212 - DNA, 2396 bp, Homo sapiens
cttccgcctactgtatcatagcagcttagaatcccagctgctggctcgggctgcagttctctcatggctcgcacagggtggaccagccccattcccctatgtgtttctctgctgctgacctgtggctttgctgaggcagggaagctgctggtagtgcccatggatgggagtcactggttcaccatgcagtcggtggtggagaaacttatcctcagggggcatgaggtggttgtagtcatgccagaggtgagttggcaactgggaaaatcactgaattgcacagtgaagacttactcaacctcatacactctggaggatctggaccgggaattcatggatttcgccgatgctcaatggaaagcacaagtacgaagtttgttttctctatttctgagttcatccaatggtttttttaacttatttttttcgcattgcaggagtttgtttaatgaccgaaaattagtagaatacttaaaggagagttcttttgatgcggtgtttcttgatccttttgatgcctgtggcttaattgttgccaaatatttctccctcccctctgtggtcttcgccaggggaatagcttgccactatcttgaagaaggtgcacagtgccctgctcctctttcctatgtccccagaattctcttagggttctcagatgccatgactttcaaggagagagtacggaaccacatcatgcacttggaggaacatttattttgccagtatttttccaaaaatgccctagaaatagcctctgaaattctccaaacacctgtcacagcatatgatctctacagccacacatcaatttggttgttgcgaacagactttgttttggactatcccaaacccgtgatgcccaatatgatcttcattggtggtatcaactgccatcagggaaagccattgcctatggaatttgaagcctacattaatgcttctggagaacatggaattgtggttttctctttgggatcaatggtctcagaaattccagagaagaaagctatggcaattgctgatgctttgggcaaaatccctcagacagtcctgtggcggtacactggaacccgaccatcgaatcttgcgaacaacacgatacttgttaagtggctaccccaaaacgatctgcttggtcacccgatgacccgtgcctttatcacccatgctggttcccatggtgtttatgaaagcatatgcaatggcgttcccatggtgatgatgcccttgtttggtgatcagatggacaatgcaaagcgcatggagactaagggagctggagtgaccctgaatgttctggaaatgacttctgaagatttagaaaatgctctaaaagcagtcatcaatgacaaaagttacaaggagaacatcatgcgcctctccagccttcacaaggaccgcccggtggagccgctggacctggccgtgttctgggtggagtttgtgatgaggcacaagggcgcgccacacctgcgccccgcagcccacgacctcacctggtaccagtaccattccttggacgtgattggtttcctcttggccgtcgtgctgacagtggccttcatcacctttaaatgttgtgcttatggctaccggaaatgcttggggaaaaaagggcgagttaagaaagcccacaaatccaagacccattgagaagtgggtgggaaataaggtaaaattttgaaccattccctagtcatttccaaacttgaaaacagaatcagtgttaaattcattttattcttattaaggaaatactttgcataaattaatcagccccagagtgctttaaaaaattctcttaaataaaaataatagactcgctagtcagtaaagatatttgaatatgtatcgtgccccctctggtgtctttgatcaggatgacatgtgccatttttcagaggacgtgcagacaggctggcattctagattacttttcttactctgaaacatggcctgtttgggagtgcgggattcaaaggtggtcccacggctgcccctactgcaaatggcagttttaatcttatcttttggcttctgcagatggttgcaattgatccttaaccaataatggtcagtcctcatctctgtcgtgcttcataggtgccaccttgtgtgtttaaagaagggaagctttgtacctttagagtgtaggtgaaatgaatgaatggcttggagtgcactgagaacagcatatgatttcttgctttggggaaaaagaatgatgctatgaaattggtgggtggtgtatttgagaagataatcattgcttatgtcaaatggagctgaatttgataaaaacccaaaatacagctatgaagtgctgggcaagtttactttttttctgatgtttcctacaactaaaaataaattaataaatttatataaattct

SEQ ID NO: 213 - protein, 530 aa, Homo sapiens
MARTGWTSPIPLCVSLLLTCGFAEAGKLLVVPMDGSHWFTMQSVVEKLILRGHEVVVVMPEVSWQLGKSLNCTVKTYSTSYTLEDLDREFMDFADAQWKAQVRSLFSLFLSSSNGFFNLFFSHCRSLFNDRKLVEYLKESSFDAVFLDPFDACGLIVAKYFSLPSVVFARGIACHYLEEGAQCPAPLSYVPRILLGFSDAMTFKERVRNHIMHLEEHLFCQYFSKNALEIASEILQTPVTAYDLYSHTSIWLLRTDFVLDYPKPVMPNMIFIGGINCHQGKPLPMEFEAYINASGEHGIVVFSLGSMVSEIPEKKAMAIADALGKIPQTVLWRYTGTRPSNLANNTILVKWLPQNDLLGHPMTRAFITHAGSHGVYESICNGVPMVMMPLFGDQMDNAKRMETKGAGVTLNVLEMTSEDLENALKAVINDKSYKENIMRLSSLHKDRPVEPLDLAVFWVEFVMRHKGAPHLRPAAHDLTWYQYHSLDVIGFLLAVVLTVAFITFKCCAYGYRKCLGKKGRVKKAHKSKTH

SEQ ID NO: 214 - DNA, 2333 bp, Homo sapiens
atggctcgtgcagggtggactggcctccttcccctatatgtgtgtctactgctgacctgtggctttgccaaggcagggaagctgctggtagtgcccatggatgggagccactggttcaccatgcagtcggtggtggagaaactcatcctcagggggcatgaggtggtcgtagtcatgccagaggtgagttggcaactgggaagatcactgaattgcacagtgaagacttactcaacctcatacactctggaggatcaggaccgggagttcatggtttttgccgatgctcgctggacggcaccattgcgaagtgcattttctctattaacaagttcatccaatggtatttttgacttatttttttcaaattgcaggagtttgtttaatgaccgaaaattagtagaatacttaaaggagagttgttttgatgcagtgtttctcgatccttttgatgcctgtggcttaattgttgccaaatatttctccctcccctctgtggtcttcgccaggggaatattttgccactatcttgaagaaggtgcacagtgccctgctcctctttcctatgtccccagacttctcttagggttctcagacgccatgactttcaaggagagagtatggaaccacatcatgcacttggaggaacatttattttgcccctattttttcaaaaatgtcttagaaatagcctctgaaattctccaaacccctgtcacggcatatgatctctacagccacacatcaatttggttgttgcgaactgactttgttttggagtatcccaaacccgtgatgcccaatatgatcttcattggtggtatcaactgtcatcagggaaagccagtgcctatggaatttgaagcctacattaatgcttctggagaacatggaattgtggttttctctttgggatcaatggtctcagaaattccagagaagaaagctatggcaattgctgatgctttgggcaaaatccctcagacagtcctgtggcggtacactggaacccgaccatcgaatcttgcgaacaacacgatacttgttaagtggctaccccaaaacgatctgcttggtcacccgatgacccgtgcctttatcacccatgctggttcccatggtgtttatgaaagcatatgcaatggcgttcccatggtgatgatgcccttgtttggtgatcagatggacaatgcaaagcgcatggagactaagggagctggagtgaccctgaatgttctggaaatgacttctgaagatttagaaaatgctctaaaagcagtcatcaatgacaaaagttacaaggagaacatcatgcgcctctccagccttcacaaggaccgcccggtggagccgctggacctggccgtgttctgggtggagtttgtgatgaggcacaagggcgcgccacacctgcgccccgcagcccacgacctcacctggtaccagtaccattccttggacgtgattggtttcctcttggccgtcgtgctgacagtggccttcatcacctttaaatgttgtgcttatggctaccggaaatgcttggggaaaaaagggcgagttaagaaagcccacaaatccaagacccattgagaagtgggtgggaaataaggtaaaattttgaaccattccctagtcatttccaaacttgaaaacagaatcagtgttaaattcattttattcttattaaggaaatactttgcataaattaatcagccccagagtgctttaaaaaattctcttaaataaaaataatagactcgctagtcagtaaagatatttgaatatgtatcgtgccccctctggtgtctttgatcaggatgacatgtgccatttttcagaggacgtgcagacaggctggcattctagattacttttcttactctgaaacatggcctgtttgggagtgcgggattcaaaggtggtcccacggctgcccctactgcaaatggcagttttaatcttatcttttggcttctgcagatggttgcaattgatccttaaccaataatggtcagtcctcatctctgtcgtgcttcataggtgccaccttgtgtgtttaaagaagggaagctttgtacctttagagtgtaggtgaaatgaatgaatggcttggagtgcactgagaacagcatatgatttcttgctttggggaaaaagaatgatgctatgaaattggtgggtggtgtatttgagaagataatcattgcttatgtcaaatggagctgaatttgataaaaacccaaaatacagctatgaagtgctgggcaagtttactttttttctgatgtttcctacaactaaaaataaattaataaatttatataaattct

SEQ ID NO: 215 - protein, 530 aa, Homo sapiens
MARAGWTGLLPLYVCLLLTCGFAKAGKLLVVPMDGSHWFTMQSVVEKLILRGHEVVVVMPEVSWQLGRSLNCTVKTYSTSYTLEDQDREFMVFADARWTAPLRSAFSLLTSSSNGIFDLFFSNCRSLFNDRKLVEYLKESCFDAVFLDPFDACGLIVAKYFSLPSVVFARGIFCHYLEEGAQCPAPLSYVPRLLLGFSDAMTFKERVWNHIMHLEEHLFCPYFFKNVLEIASEILQTPVTAYDLYSHTSIWLLRTDFVLEYPKPVMPNMIFIGGINCHQGKPVPMEFEAYINASGEHGIVVFSLGSMVSEIPEKKAMAIADALGKIPQTVLWRYTGTRPSNLANNTILVKWLPQNDLLGHPMTRAFITHAGSHGVYESICNGVPMVMMPLFGDQMDNAKRMETKGAGVTLNVLEMTSEDLENALKAVINDKSYKENIMRLSSLHKDRPVEPLDLAVFWVEFVMRHKGAPHLRPAAHDLTWYQYHSLDVIGFLLAVVLTVAFITFKCCAYGYRKCLGKKGRVKKAHKSKTH

SEQ ID NO: 216 - DNA, 2345 bp, Homo sapiens
atggccacaggactccaggttcccctgccgcagctggccacaggactgctgcttctcctcagtgtccagccctgggctgagagtgggaaggtgctggtggtgcccactgatggcagccactggctcagcatgcgggaggccttgcgggacctccatgcgagaggccaccaggtggtggtcctcaccctggaggtgaatatgtacatcaaagaagagaactttttcaccctgacaacgtatgccatttcatggacccaggacgaatttgatcgccttttgctgggtcacactcaatcgttctttgaaacagaacatcttctgatgaaattttctagaagaatggcaattatgaacaatatgtctttgatcatacataggtcttgtgtggagctactgcataatgaggccctgatcaggcacctgcatgctacttcctttgatgtggttctaacagacccctttcacctctgcgcggcggtgctggctaagtacctgtcgattcctgctgtgtttttcttgaggaacattccatgtgatttagactttaagggcacacagtgtccaaacccttcctcctatattcctagattactaacgaccaattcagaccacatgacattcctgcaaagggtcaagaacatgctctaccctctggccctgtcctacctttgccatgctgtttctgctccttatgcaagccttgcctctgagctttttcagagagaggtgtcagtggtggatcttgtcagccatgcatctgtgtggctgttccgaggggactttgtgatggattaccccaggccgatcatgcccaacatggtcttcattgggggcatcaactgtgccaacgggaagccactatctcaggaatttgaagcctacattaatgcttctggagaacatggaattgtggttttctctttgggatcaatggtctcagaaattccagagaagaaagctatggcaattgctgatgctttgggcaaaatccctcagacagtcctgtggcggtacactggaacccgaccatcgaatcttgcgaacaacacgatacttgttaagtggctaccccaaaacgatctgcttggtcacccgatgacccgtgcctttatcacccatgctggttcccatggtgtttatgaaagcatatgcaatggcgttcccatggtgatgatgcccttgtttggtgatcagatggacaatgcaaagcgcatggagactaagggagctggagtgaccctgaatgttctggaaatgacttctgaagatttagaaaatgctctaaaagcagtcatcaatgacaaaagttacaaggagaacatcatgcgcctctccagccttcacaaggaccgcccggtggagccgctggacctggccgtgttctgggtggagtttgtgatgaggcacaagggcgcgccacacctgcgccccgcagcccacgacctcacctggtaccagtaccattccttggacgtgattggtttcctcttggccgtcgtgctgacagtggccttcatcacctttaaatgttgtgcttatggctaccggaaatgcttggggaaaaaagggcgagttaagaaagcccacaaatccaagacccattgagaagtgggtgggaaataaggtaaaattttgaaccattccctagtcatttccaaacttgaaaacagaatcagtgttaaattcattttattcttattaaggaaatactttgcataaattaatcagccccagagtgctttaaaaaattctcttaaataaaaataatagactcgctagtcagtaaagatatttgaatatgtatcgtgccccctctggtgtctttgatcaggatgacatgtgccatttttcagaggacgtgcagacaggctggcattctagattacttttcttactctgaaacatggcctgtttgggagtgcgggattcaaaggtggtcccacggctgcccctactgcaaatggcagttttaatcttatcttttggcttctgcagatggttgcaattgatccttaaccaataatggtcagtcctcatctctgtcgtgcttcataggtgccaccttgtgtgtttaaagaagggaagctttgtacctttagagtgtaggtgaaatgaatgaatggcttggagtgcactgagaacagcatatgatttcttgctttggggaaaaagaatgatgctatgaaattggtgggtggtgtatttgagaagataatcattgcttatgtcaaatggagctgaatttgataaaaacccaaaatacagctatgaagtgctgggcaagtttactttttttctgatgtttcctacaactaaaaataaattaataaatttatataaattct

SEQ ID NO: 217 - protein, 534 aa, Homo sapiens
MATGLQVPLPQLATGLLLLLSVQPWAESGKVLVVPTDGSHWLSMREALRDLHARGHQVVVLTLEVNMYIKEENFFTLTTYAISWTQDEFDRLLLGHTQSFFETEHLLMKFSRRMAIMNNMSLIIHRSCVELLHNEALIRHLHATSFDVVLTDPFHLCAAVLAKYLSIPAVFFLRNIPCDLDFKGTQCPNPSSYIPRLLTTNSDHMTFLQRVKNMLYPLALSYLCHAVSAPYASLASELFQREVSVVDLVSHASVWLFRGDFVMDYPRPIMPNMVFIGGINCANGKPLSQEFEAYINASGEHGIVVFSLGSMVSEIPEKKAMAIADALGKIPQTVLWRYTGTRPSNLANNTILVKWLPQNDLLGHPMTRAFITHAGSHGVYESICNGVPMVMMPLFGDQMDNAKRMETKGAGVTLNVLEMTSEDLENALKAVINDKSYKENIMRLSSLHKDRPVEPLDLAVFWVEFVMRHKGAPHLRPAAHDLTWYQYHSLDVIGFLLAVVLTVAFITFKCCAYGYRKCLGKKGRVKKAHKSKTH

SEQ ID NO: 218 - DNA, 2345 bp, Homo sapiens
atggccacaggactccaggttcccctgccgtggctggccacaggactgctgcttctcctcagtgtccagccctgggctgagagtggaaaggtgttggtggtgcccattgatggcagccactggctcagcatgcgggaggtcttgcgggagctccatgccagaggccaccaggcagtggtcctcaccccagaggtgaatatgcacatcaaagaagagaactttttcaccctgacaacctatgccatttcgtggacccaggatgaatttgatcgccatgtgctgggccacactcaactgtactttgaaacagaacattttctgaagaaatttttcagaagtatggcaatgttgaacaatatgtctttggtctatcataggtcttgtgtggagctactacataatgaggccctgatcaggcacctgaatgctacttcctttgatgtggttttaacagaccccgttaacctctgcgcggcagtgctggctaagtacctgtcgattcctactgtgttttttttgaggaacattccatgtgatttagactttaagggcacacagtgtccaaacccttcctcctatattcctagattactaacaaccaattcagaccacatgacattcatgcaaagggtcaagaacatgctctaccctctggccctgtcctacatttgccatgctttttctgctccttatgcaagccttgcctctgagctttttcagagagaggtgtcagtggtggatattctcagtcatgcatctgtgtggctgttccgaggggactttgtgatggactaccccaggccaatcatgcccaacatggtcttcattgggggcatcaactgtgccaacaggaagccactatctcaggaatttgaagcctacattaatgcttctggagaacatggaattgtggttttctctttgggatcaatggtctcagaaattccagagaagaaagctatggcaattgctgatgctttgggcaaaatccctcagacagtcctgtggcggtacactggaacccgaccatcgaatcttgcgaacaacacgatacttgttaagtggctaccccaaaacgatctgcttggtcacccgatgacccgtgcctttatcacccatgctggttcccatggtgtttatgaaagcatatgcaatggcgttcccatggtgatgatgcccttgtttggtgatcagatggacaatgcaaagcgcatggagactaagggagctggagtgaccctgaatgttctggaaatgacttctgaagatttagaaaatgctctaaaagcagtcatcaatgacaaaagttacaaggagaacatcatgcgcctctccagccttcacaaggaccgcccggtggagccgctggacctggccgtgttctgggtggagtttgtgatgaggcacaagggcgcgccacacctgcgccccgcagcccacgacctcacctggtaccagtaccattccttggacgtgattggtttcctcttggccgtcgtgctgacagtggccttcatcacctttaaatgttgtgcttatggctaccggaaatgcttggggaaaaaagggcgagttaagaaagcccacaaatccaagacccattgagaagtgggtgggaaataaggtaaaattttgaaccattccctagtcatttccaaacttgaaaacagaatcagtgttaaattcattttattcttattaaggaaatactttgcataaattaatcagccccagagtgctttaaaaaattctcttaaataaaaataatagactcgctagtcagtaaagatatttgaatatgtatcgtgccccctctggtgtctttgatcaggatgacatgtgccatttttcagaggacgtgcagacaggctggcattctagattacttttcttactctgaaacatggcctgtttgggagtgcgggattcaaaggtggtcccacggctgcccctactgcaaatggcagttttaatcttatcttttggcttctgcagatggttgcaattgatccttaaccaataatggtcagtcctcatctctgtcgtgcttcataggtgccaccttgtgtgtttaaagaagggaagctttgtacctttagagtgtaggtgaaatgaatgaatggcttggagtgcactgagaacagcatatgatttcttgctttggggaaaaagaatgatgctatgaaattggtgggtggtgtatttgagaagataatcattgcttatgtcaaatggagctgaatttgataaaaacccaaaatacagctatgaagtgctgggcaagtttactttttttctgatgtttcctacaactaaaaataaattaataaatttatataaattct

SEQ ID NO: 219 - protein, 534 aa, Homo sapiens
MATGLQVPLPWLATGLLLLLSVQPWAESGKVLVVPIDGSHWLSMREVLRELHARGHQAVVLTPEVNMHIKEENFFTLTTYAISWTQDEFDRHVLGHTQLYFETEHFLKKFFRSMAMLNNMSLVYHRSCVELLHNEALIRHLNATSFDVVLTDPVNLCAAVLAKYLSIPTVFFLRNIPCDLDFKGTQCPNPSSYIPRLLTTNSDHMTFMQRVKNMLYPLALSYICHAFSAPYASLASELFQREVSVVDILSHASVWLFRGDFVMDYPRPIMPNMVFIGGINCANRKPLSQEFEAYINASGEHGIVVFSLGSMVSEIPEKKAMAIADALGKIPQTVLWRYTGTRPSNLANNTILVKWLPQNDLLGHPMTRAFITHAGSHGVYESICNGVPMVMMPLFGDQMDNAKRMETKGAGVTLNVLEMTSEDLENALKAVINDKSYKENIMRLSSLHKDRPVEPLDLAVFWVEFVMRHKGAPHLRPAAHDLTWYQYHSLDVIGFLLAVVLTVAFITFKCCAYGYRKCLGKKGRVKKAHKSKTH

SEQ ID NO: 220 - DNA, 2395 bp, Homo sapiens
agattcccagctgcttgctctcagctgcagttctctgatggcttgcacagggtggaccagcccccttcctctatgtgtgtgtctgctgctgacctgtggctttgccgaggcagggaagctactggtagtgcccatggatgggagccactggttcaccatgaggtcggtggtggagaaactcattctcagggggcatgaggtggttgtagtcatgccagaggtgagttggcaactgggaagatcactgaattgcacagtgaagacttattcaacttcatataccctggaggatctggaccgggagttcaaggcttttgcccatgctcaatggaaagcacaagtacgaagtatatattctctattaatgggttcatacaatgacatttttgacttatttttttcaaattgcaggagtttgtttaaagacaaaaaattagtagaatacttaaaggagagttcttttgatgcagtgtttctcgatccttttgataactgtggcttaattgttgccaaatatttctccctcccctccgtggtcttcgccaggggaatactttgccactatcttgaagaaggtgcacagtgccctgctcctctttcctatgtccccagaattctcttagggttctcagatgccatgactttcaaggagagagtacggaaccacatcatgcacttggaggaacatttattatgccaccgttttttcaaaaatgccctagaaatagcctctgaaattctccaaacacctgttacggagtatgatctctacagccacacatcaatttggttgttgcgaacggactttgttttggactatcccaaacccgtgatgcccaacatgatcttcattggtggtatcaactgccatcagggaaagccgttgcctatggaatttgaagcctacattaatgcttctggagaacatggaattgtggttttctctttgggatcaatggtctcagaaattccagagaagaaagctatggcaattgctgatgctttgggcaaaatccctcagacagtcctgtggcggtacactggaacccgaccatcgaatcttgcgaacaacacgatacttgttaagtggctaccccaaaacgatctgcttggtcacccgatgacccgtgcctttatcacccatgctggttcccatggtgtttatgaaagcatatgcaatggcgttcccatggtgatgatgcccttgtttggtgatcagatggacaatgcaaagcgcatggagactaagggagctggagtgaccctgaatgttctggaaatgacttctgaagatttagaaaatgctctaaaagcagtcatcaatgacaaaagttacaaggagaacatcatgcgcctctccagccttcacaaggaccgcccggtggagccgctggacctggccgtgttctgggtggagtttgtgatgaggcacaagggcgcgccacacctgcgccccgcagcccacgacctcacctggtaccagtaccattccttggacgtgattggtttcctcttggccgtcgtgctgacagtggccttcatcacctttaaatgttgtgcttatggctaccggaaatgcttggggaaaaaagggcgagttaagaaagcccacaaatccaagacccattgagaagtgggtgggaaataaggtaaaattttgaaccattccctagtcatttccaaacttgaaaacagaatcagtgttaaattcattttattcttattaaggaaatactttgcataaattaatcagccccagagtgctttaaaaaattctcttaaataaaaataatagactcgctagtcagtaaagatatttgaatatgtatcgtgccccctctggtgtctttgatcaggatgacatgtgccatttttcagaggacgtgcagacaggctggcattctagattacttttcttactctgaaacatggcctgtttgggagtgcgggattcaaaggtggtcccacggctgcccctactgcaaatggcagttttaatcttatcttttggcttctgcagatggttgcaattgatccttaaccaataatggtcagtcctcatctctgtcgtgcttcataggtgccaccttgtgtgtttaaagaagggaagctttgtacctttagagtgtaggtgaaatgaatgaatggcttggagtgcactgagaacagcatatgatttcttgctttggggaaaaagaatgatgctatgaaattggtgggtggtgtatttgagaagataatcattgcttatgtcaaatggagctgaatttgataaaaacccaaaatacagctatgaagtgctgggcaagtttactttttttctgatgtttcctacaactaaaaataaattaataaatttatataaattctatttaaaaaaaaaaaaaaaaaaaaa

SEQ ID NO: 221 - protein, 530 aa, Homo sapiens
MACTGWTSPLPLCVCLLLTCGFAEAGKLLVVPMDGSHWFTMRSVVEKLILRGHEVVVVMPEVSWQLGRSLNCTVKTYSTSYTLEDLDREFKAFAHAQWKAQVRSIYSLLMGSYNDIFDLFFSNCRSLFKDKKLVEYLKESSFDAVFLDPFDNCGLIVAKYFSLPSVVFARGILCHYLEEGAQCPAPLSYVPRILLGFSDAMTFKERVRNHIMHLEEHLLCHRFFKNALEIASEILQTPVTEYDLYSHTSIWLLRTDFVLDYPKPVMPNMIFIGGINCHQGKPLPMEFEAYINASGEHGIVVFSLGSMVSEIPEKKAMAIADALGKIPQTVLWRYTGTRPSNLANNTILVKWLPQNDLLGHPMTRAFITHAGSHGVYESICNGVPMVMMPLFGDQMDNAKRMETKGAGVTLNVLEMTSEDLENALKAVINDKSYKENIMRLSSLHKDRPVEPLDLAVFWVEFVMRHKGAPHLRPAAHDLTWYQYHSLDVIGFLLAVVLTVAFITFKCCAYGYRKCLGKKGRVKKAHKSKTH

SEQ ID NO: 222 - DNA, 1691 bp, Homo sapiens
agaaacctgaagctcaggagaggagtcactcccctggcagatgggtggctgggccagaagcagataccaggctttctgactcctgctctaggattctcaccacgtactggctagacttatacttctcaaatcttaatttcctaaaggccggtcatgcccaacatggtcttcattggaggtatcaactgtaagaagaggaaagacttgtctcaggaatttgaagcctacattaatgcttctggagaacatggaattgtggttttctctttgggatcaatggtctcagaaattccagagaagaaagctatggcaattgctgatgctttgggcaaaatccctcagacagtcctgtggcggtacactggaacccgaccatcgaatcttgcgaacaacacgatacttgttaagtggctaccccaaaacgatctgcttggtcacccgatgacccgtgcctttatcacccatgctggttcccatggtgtttatgaaagcatatgcaatggcgttcccatggtgatgatgcccttgtttggtgatcagatggacaatgcaaagcgcatggagactaagggagctggagtgaccctgaatgttctggaaatgacttctgaagatttagaaaatgctctaaaagcagtcatcaatgacaaaagttacaaggagaacatcatgcgcctctccagccttcacaaggaccgcccggtggagccgctggacctggccgtgttctgggtggagtttgtgatgaggcacaagggcgcgccacacctgcgccccgcagcccacgacctcacctggtaccagtaccattccttggacgtgattggtttcctcttggccgtcgtgctgacagtggccttcatcacctttaaatgttgtgcttatggctaccggaaatgcttggggaaaaaagggcgagttaagaaagcccacaaatccaagacccattgagaagtgggtgggaaataaggtaaaattttgaaccattccctagtcatttccaaacttgaaaacagaatcagtgttaaattcattttattcttattaaggaaatactttgcataaattaatcagccccagagtgctttaaaaaattctcttaaataaaaataatagactcgctagtcagtaaagatatttgaatatgtatcgtgccccctctggtgtctttgatcaggatgacatgtgccatttttcagaggacgtgcagacaggctggcattctagattacttttcttactctgaaacatggcctgtttgggagtgcgggattcaaaggtggtcccacggctgcccctactgcaaatggcagttttaatcttatcttttggcttctgcagatggttgcaattgatccttaaccaataatggtcagtcctcatctctgtcgtgcttcataggtgccaccttgtgtgtttaaagaagggaagctttgtacctttagagtgtaggtgaaatgaatgaatggcttggagtgcactgagaacagcatatgatttcttgctttggggaaaaagaatgatgctatgaaattggtgggtggtgtatttgagaagataatcattgcttatgtcaaatggagctgaatttgataaaaacccaaaatacagctatgaagtgctgggcaagtttactttttttctgatgtttcctacaactaaaaataaattaataaatttatataaattct

SEQ ID NO: 223 - protein, 265 aa, Homo sapiens
MPNMVFIGGINCKKRKDLSQEFEAYINASGEHGIVVFSLGSMVSEIPEKKAMAIADALGKIPQTVLWRYTGTRPSNLANNTILVKWLPQNDLLGHPMTRAFITHAGSHGVYESICNGVPMVMMPLFGDQMDNAKRMETKGAGVTLNVLEMTSEDLENALKAVINDKSYKENIMRLSSLHKDRPVEPLDLAVFWVEFVMRHKGAPHLRPAAHDLTWYQYHSLDVIGFLLAVVLTVAFITFKCCAYGYRKCLGKKGRVKKAHKSKTH

SEQ ID NO: 224 - DNA, 2308 bp, Homo sapiens
cccggggcgtatgacgccggagccctctgaccgcacctctgaccacaacaaacccctactccacccgtcttgtttgtcccacccttggtgacgcagagccccagcccagaccccgcccaaagcactcatttaactggtattgcggagccacgaggcttctgcttactgcaactcgctccggccgctgggcgtagctgcgactcggcggagtcccggcggcgcgtccttgttctaacccggcgcgccatgaccgtcgcgcggccgagcgtgcccgcggcgctgcccctcctcggggagctgccccggctgctgctgctggtgctgttgtgcctgccggccgtgtggggtgactgtggccttcccccagatgtacctaatgcccagccagctttggaaggccgtacaagttttcccgaggatactgtaataacgtacaaatgtgaagaaagctttgtgaaaattcctggcgagaaggactcagtgatctgccttaagggcagtcaatggtcagatattgaagagttctgcaatcgtagctgcgaggtgccaacaaggctaaattctgcatccctcaaacagccttatatcactcagaattattttccagtcggtactgttgtggaatatgagtgccgtccaggttacagaagagaaccttctctatcaccaaaactaacttgccttcagaatttaaaatggtccacagcagtcgaattttgtaaaaagaaatcatgccctaatccgggagaaatacgaaatggtcagattgatgtaccaggtggcatattatttggtgcaaccatctccttctcatgtaacacagggtacaaattatttggctcgacttctagtttttgtcttatttcaggcagctctgtccagtggagtgacccgttgccagagtgcagagaaatttattgtccagcaccaccacaaattgacaatggaataattcaaggggaacgtgaccattatggatatagacagtctgtaacgtatgcatgtaataaaggattcaccatgattggagagcactctatttattgtactgtgaataatgatgaaggagagtggagtggcccaccacctgaatgcagaggaaaatctctaacttccaaggtcccaccaacagttcagaaacctaccacagtaaatgttccaactacagaagtctcaccaacttctcagaaaaccaccacaaaaaccaccacaccaaatgctcaagcaacacggagtacacctgtttccaggacaaccaagcattttcatgaaacaaccccaaataaaggaagtggaaccacttcaggtactacccgtcttctatctgggcacacgtgtttcacgttgacaggtttgcttgggacgctagtaaccatgggcttgctgacttagccaaagaagagttaagaagaaaatacacacaagtatacagactgttcctagtttcttagacttatctgcatattggataaaataaatgcaattgtgctcttcatttaggatgctttcattgtctttaagatgtgttaggaatgtcaacagagcaaggagaaaaaaggcagtcctggaatcacattcttagcacacctacacctcttgaaaatagaacaacttgcagaattgagagtgattcctttcctaaaagtgtaagaaagcatagagatttgttcgtatttagaatgggatcacgaggaaaagagaaggaaagtgatttttttccacaagatctgtaatgttatttccacttataaaggaaataaaaaatgaaaaacattatttggatatcaaaagcaaataaaaacccaattcagtctcttctaagcaaaattgctaaagagagatgaaccacattataaagtaatctttggctgtaaggcattttcatctttccttcgggttggcaaaatattttaaaggtaaaacatgctggtgaaccaggggtgttgatggtgataagggaggaatatagaatgaaagactgaatcttcctttgttgcacaaatagagtttggaaaaagcctgtgaaaggtgtcttctttgacttaatgtctttaaaagtatccagagatactacaatattaacataagaaaagattatatattatttctgaatcgagatgtccatagtcaaatttgtaaatcttattcttttgtaatatttatttatatttatttatgacagtgaacattctgattttacatgtaaaacaagaaaagttgaagaagatatgtgaagaaaaatgtatttttcctaaatagaaataaatgatcccattttttggtaaaaaaaaaaaaaaaaaaaaaaaaa

SEQ ID NO: 225 - protein, 381 aa, Homo sapiens
MTVARPSVPAALPLLGELPRLLLLVLLCLPAVWGDCGLPPDVPNAQPALEGRTSFPEDTVITYKCEESFVKIPGEKDSVICLKGSQWSDIEEFCNRSCEVPTRLNSASLKQPYITQNYFPVGTVVEYECRPGYRREPSLSPKLTCLQNLKWSTAVEFCKKKSCPNPGEIRNGQIDVPGGILFGATISFSCNTGYKLFGSTSSFCLISGSSVQWSDPLPECREIYCPAPPQIDNGIIQGERDHYGYRQSVTYACNKGFTMIGEHSIYCTVNNDEGEWSGPPPECRGKSLTSKVPPTVQKPTTVNVPTTEVSPTSQKTTTKTTTPNAQATRSTPVSRTTKHFHETTPNKGSGTTSGTTRLLSGHTCFTLTGLLGTLVTMGLLT

SEQ ID NO: 226 - DNA, 2357 bp, Homo sapiens
gaggagacgcgctttgtgctgggcgccggccgcgccagccacggcctgcggcgcccgcggcaccatgatctccaccaaggagaagaacaagatcccgaaggacagcatgacgcttctgccctgcttctacttcgtggagctgcccatagtggcttcttccatcgtatccttgtacttcctggagctgaccgacctcttcaagccggccaaggtgggcttccagtgctatgaccgcactctctccatgccctacgtggagaccaacgaggagctcatcccgctgctgatgctgctcagcttggccttcgcggcccctgccgcctcgatcatggtggccgagggcatgttgtactgtctgcagtcccggctgtggggccgtgccggggggcccgccggggcggagggcagcatcaacgccggcggctgcaacttcaactccttcctgcggcgtacggtgcggtttgtgggtgtccacgtgttcggcctgtgtgccacagccctggtgacggacgtgatccagctggccacgggttaccacactcccttcttcctcaccgtctgcaagcccaactacactctcctgggcacgtcctgcgaggtcaacccctacatcacgcaggacatctgctccggccacgacatccacgccatcctgtctgcacggaagaccttcccgtcccagcacgccacgctgtcagccttcgccgcggtctatgtgtcggtgagtccggcacctcactgcccttcccaggccctcttgctgacccgtggggagccctccctgaccccaacccccatgccccagatgtacttcaactcggtcatctcggacaccaccaagctgctgaagcccatcctggtcttcgcctttgccatcgccgcgggcgtatgcgggctcacgcagatcacgcagtaccgcagccaccctgtggacgtgtatgccggcttcctcatcggggcgggcatcgctgcctacctggcctgccacgcggtgggcaacttccaggccccacctgcagagaagcccgcggccccggcccccgccaaggacgcgctgcgggccctgacgcagcggggccacgactcggtttatcagcagaataagtcggtgagcaccgacgagctggggcccccagggcggctggagggcgcgccccggcccgtggcccgcgagaagacctcgctgggcagcctgaagcgcgccagcgtggacgtggacctgctggccccgcgcagccccatggccaaggagaacatggtgaccttcagccacacgctgcccagggccagcgcgccctcgctggacgaccccgcgcgccgccacatgaccatccacgtgccgctggacgcctcgcgctccaagcagctcatcagcgagtggaagcagaagagcctggagggccgcggcctggggctgcccgacgacgccagccccgggcacctgcgcgcgcccgccgaacccatggcggaggaggaggaagaggaggaggacgaagaggaagaggaggaggaggaagaggaggaggacgagggcccggccccgccctcgctctaccccaccgtgcaggcgcggccggggctggggcctcgggtcatcctcccaccgcgcgcggggccgccgccgctggtgcacatcccggaggagggcgcgcagacgggggccggcctgtcccccaaaagcggcgccggggtgcgcgccaagtggctcatgatggccgagaagagcggggcggcagtggccaaccctccgcggctgctgcaggtcatcgccatgtccaaggctccgggcgcgccgggccccaaggcggccgagacggcgtcgtcgtccagcgccagctccgactcctcgcagtaccggtcgccgtcggaccgcgactccgccagcatcgtgaccatcgacgcgcacgcgccgcaccaccccgtggtgcacctgtcggccggcggcgcgccctgggagtggaaggcggcgggcggcggggccaaggcggaggccgacggcggctacgagctgggggacctggcgcgcggcttccgcggcggggccaagcccccgggcgtgtcccccggctcgtcggtcagcgacgtggaccaggaggagccgcggttcggggccgtggccaccgtcaacctggccacgggcgaggggctgcccccgctgggcgcggccgatggggcgctgggcccgggcagccgggagtccacgctgcggcgccacgcgggcggcctggggctggcggagcgcgaggcggaggcggaggccgagggctacttccgcaagatgcaggcgcgccgcttccccgactagcgcggcggggccgggggcgggcggggggcgggccgagggcgcgggcggccgc

SEQ ID NO: 227 - protein, 746 aa, Homo sapiens
MISTKEKNKIPKDSMTLLPCFYFVELPIVASSIVSLYFLELTDLFKPAKVGFQCYDRTLSMPYVETNEELIPLLMLLSLAFAAPAASIMVAEGMLYCLQSRLWGRAGGPAGAEGSINAGGCNFNSFLRRTVRFVGVHVFGLCATALVTDVIQLATGYHTPFFLTVCKPNYTLLGTSCEVNPYITQDICSGHDIHAILSARKTFPSQHATLSAFAAVYVSVSPAPHCPSQALLLTRGEPSLTPTPMPQMYFNSVISDTTKLLKPILVFAFAIAAGVCGLTQITQYRSHPVDVYAGFLIGAGIAAYLACHAVGNFQAPPAEKPAAPAPAKDALRALTQRGHDSVYQQNKSVSTDELGPPGRLEGAPRPVAREKTSLGSLKRASVDVDLLAPRSPMAKENMVTFSHTLPRASAPSLDDPARRHMTIHVPLDASRSKQLISEWKQKSLEGRGLGLPDDASPGHLRAPAEPMAEEEEEEEDEEEEEEEEEEEDEGPAPPSLYPTVQARPGLGPRVILPPRAGPPPLVHIPEEGAQTGAGLSPKSGAGVRAKWLMMAEKSGAAVANPPRLLQVIAMSKAPGAPGPKAAETASSSSASSDSSQYRSPSDRDSASIVTIDAHAPHHPVVHLSAGGAPWEWKAAGGGAKAEADGGYELGDLARGFRGGAKPPGVSPGSSVSDVDQEEPRFGAVATVNLATGEGLPPLGAADGALGPGSRESTLRRHAGGLGLAEREAEAEAEGYFRKMQARRFPD

SEQ ID NO: 228 - DNA, 1837 bp, Homo sapiens
acaaccgtaacagccaccagacaagcttcagtggccggcccttcacatccagacttgcctgagaggacccacctctgagtgtccagtggtcagttgccccaggatggggaccacagccagagcagccttggtcttgacctatttggctgttgcttctgctgcctctgagggaggcttcacggctacaggacagaggcagctgaggccagagcactttcaagaagttggctacgcagctcccccctccccacccctatcccgaagcctccccatggatcaccctgactcctctcagcatggccctccctttgagggacagagtcaagtgcagccccctccctctcaggaggccacccctctccaacaggaaaagctgctacctgcccaactccctgctgaaaaggaagtgggtccccctctccctcaggaagctgtccccctccaaaaagagctgccctctctccagcaccccaatgaacagaaggaaggaacgccagctccatttggggaccagagccatccagaacctgagtcctggaatgcagcccagcactgccaacaggaccggtcccaagggggctggggccaccggctggatggcttcccccctgggcggccttctccagacaatctgaaccaaatctgccttcctaaccgtcagcatgtggtatatggtccctggaacctaccacagtccagctactcccacctcactcgccagggtgagaccctcaatttcctggagattggatattcccgctgctgccactgccgcagccacacaaaccgcctagagtgtgccaaacttgtgtgggaggaagcaatgagccgattctgtgaggccgagttctcggtcaagacccgaccccactggtgctgcacgcggcagggggaggctcggttctcctgcttccaggaggaagctccccagccacactaccagctccgggcctgccccagccatcagcctgatatttcctcgggtcttgagctgcctttccctcctggggtgcccacattggacaatatcaagaacatctgccacctgaggcgcttccgctctgtgccacgcaacctgccagctactgaccccctacaaagggagctgctggcactgatccagctggagagggagttccagcgctgctgccgccaggggaacaatcacacctgtacatggaaggcctgggaggatacccttgacaaatactgtgaccgggagtatgctgtgaagacccaccaccacttgtgttgccgccaccctcccagccctactcgggatgagtgctttgcccgtcgggctccttaccccaactatgaccgggacatcttgaccattgacatcagtcgagtcacccccaacctcatgggccacctctgtggaaaccaaagagttctcaccaagcataaacatattcctgggctgatccacaacatgactgcccgctgctgtgacctgccatttccagaacaggcctgctgtgcagaggaggagaaattaaccttcatcaatgatctgtgtggtccccgacgtaacatctggcgagaccctgccctctgctgttacctgagtcctggggatgaacaggtcaactgcttcaacatcaattatctgaggaacgtggctctagtgtctggagacactgagaacgccaagggccagggggagcagggctcaactggaggaacaaatatcagctccacctctgagcccaaggaagaatgagtcaccccagagccctagagggtcagatggggggaaccccaccctgccccacccatctgaacactcattacactaaacacctcttggatttggaaaaaaaaaaaaaaaaaa

SEQ ID NO: 229 - protein, 540 aa, Homo sapiens
MGTTARAALVLTYLAVASAASEGGFTATGQRQLRPEHFQEVGYAAPPSPPLSRSLPMDHPDSSQHGPPFEGQSQVQPPPSQEATPLQQEKLLPAQLPAEKEVGPPLPQEAVPLQKELPSLQHPNEQKEGTPAPFGDQSHPEPESWNAAQHCQQDRSQGGWGHRLDGFPPGRPSPDNLNQICLPNRQHVVYGPWNLPQSSYSHLTRQGETLNFLEIGYSRCCHCRSHTNRLECAKLVWEEAMSRFCEAEFSVKTRPHWCCTRQGEARFSCFQEEAPQPHYQLRACPSHQPDISSGLELPFPPGVPTLDNIKNICHLRRFRSVPRNLPATDPLQRELLALIQLEREFQRCCRQGNNHTCTWKAWEDTLDKYCDREYAVKTHHHLCCRHPPSPTRDECFARRAPYPNYDRDILTIDISRVTPNLMGHLCGNQRVLTKHKHIPGLIHNMTARCCDLPFPEQACCAEEEKLTFINDLCGPRRNIWRDPALCCYLSPGDEQVNCFNINYLRNVALVSGDTENAKGQGEQGSTGGTNISSTSEPKEE

SEQ ID NO: 230 - DNA, 1462 bp, Homo sapiens
acaaccgtaacagccaccagacaagcttcagtggccggcccttcacatccagacttgcctgagaggacccacctctgagtgtccagtggtcagttgccccaggatggggaccacagccagagcagccttggtcttgacctatttggctgttgcttctgctgcctctgagggaggcttcacggctacaggacagaggcagctgaggccagagcactttcaagaagttggctacgcagctcccccctccccacccctatcccgaagcctccccatggatcaccctgactcctctcagcatggccctccctttgagggacagagtcaagtgcagccccctccctctcaggaggccacccctctccaacaggaaaagctgctacctgcccaactccctgctgaaaaggaagtgggtccccctctccctcaggaagctgtccccctccaaaaagagctgccctctctccagcaccccaatgaacagaaggaaggaacgccagctccatttggggaccagagccatccagaacctgagtcctggaatgcagcccagcactgccaacaggaccggtcccaagggggctggggccaccggctggatggcttcccccctgggcggccttctccagacaatctgaaccaaatctgccttcctaaccgtcagcatgtggtatatggtccctggaacctaccacagtccagctactcccacctcactcgccagggtgagaccctcaatttcctggagattggatattcccgctgctgccactgccgcagccacacaaaccgcctagagtgtgccaaacttgtgtgggaggatacccttgacaaatactgtgaccgggagtatgctgtgaagacccaccaccacttgtgttgccgccaccctcccagccctactcgggatgagtgctttgcccgtcgggctccttaccccaactatgaccgggacatcttgaccattgacatcagtcgagtcacccccaacctcatgggccacctctgtggaaaccaaagagttctcaccaagcataaacatattcctgggctgatccacaacatgactgcccgctgctgtgacctgccatttccagaacaggcctgctgtgcagaggaggagaaattaaccttcatcaatgatctgtgtggtccccgacgtaacatctggcgagaccctgccctctgctgttacctgagtcctggggatgaacaggtcaactgcttcaacatcaattatctgaggaacgtggctctagtgtctggagacactgagaacgccaagggccagggggagcagggctcaactggaggaacaaatatcagctccacctctgagcccaaggaagaatgagtcaccccagagccctagagggtcagatggggggaaccccaccctgccccacccatctgaacactcattacactaaacacctcttggatttggaaaaaaaaaaaaaaaaaa

SEQ ID NO: 231 - protein, 415 aa, Homo sapiens
MGTTARAALVLTYLAVASAASEGGFTATGQRQLRPEHFQEVGYAAPPSPPLSRSLPMDHPDSSQHGPPFEGQSQVQPPPSQEATPLQQEKLLPAQLPAEKEVGPPLPQEAVPLQKELPSLQHPNEQKEGTPAPFGDQSHPEPESWNAAQHCQQDRSQGGWGHRLDGFPPGRPSPDNLNQICLPNRQHVVYGPWNLPQSSYSHLTRQGETLNFLEIGYSRCCHCRSHTNRLECAKLVWEDTLDKYCDREYAVKTHHHLCCRHPPSPTRDECFARRAPYPNYDRDILTIDISRVTPNLMGHLCGNQRVLTKHKHIPGLIHNMTARCCDLPFPEQACCAEEEKLTFINDLCGPRRNIWRDPALCCYLSPGDEQVNCFNINYLRNVALVSGDTENAKGQGEQGSTGGTNISSTSEPKEE

SEQ ID NO: 232 - DNA, 5810 bp, Homo sapiens
aacgggctcattcagcggtcgcgagctgcccgcgagggggagcggccggacggagagcgcgacccgtcccgggggtggggccgggcgcagcggcgagaggaggcgaaggtggctgcggtagcagcagcgcggcagcctcggacccagcccggagcgcagggcggccgctgcaggtccccgctcccctccccgtgcgtccgcccatggccgccgccgggcagctgtgcttgctctacctgtcggcggggctcctgtcccggctcggcgcagccttcaacttggacactcgggaggacaacgtgatccggaaatatggagaccccgggagcctcttcggcttctcgctggccatgcactggcaactgcagcccgaggacaagcggctgttgctcgtgggggccccgcgggcagaagcgcttccactgcagagagccaacagaacgggagggctgtacagctgcgacatcaccgcccgggggccatgcacgcggatcgagtttgataacgatgctgaccccacgtcagaaagcaaggaagatcagtggatgggggtcaccgtccagagccaaggtccagggggcaaggtcgtgacatgtgctcaccgatatgaaaaaaggcagcatgttaatacgaagcaggaatcccgagacatctttgggcggtgttatgtcctgagtcagaatctcaggattgaagacgatatggatgggggagattggagcttttgtgatgggcgattgagaggccatgagaaatttggctcttgccagcaaggtgtagcagctacttttactaaagactttcattacattgtatttggagccccgggtacttataactggaaagggattgttcgtgtagagcaaaagaataacactttttttgacatgaacatctttgaagatgggccttatgaagttggtggagagactgagcatgatgaaagtctcgttcctgttcctgctaacagttacttaggtttttctttggactcagggaaaggtattgtttctaaagatgagatcacttttgtatctggtgctcccagagccaatcacagtggagccgtggttttgctgaagagagacatgaagtctgcacatctcctccctgagcacatattcgatggagaaggtctggcctcttcatttggctatgatgtggcggtggtggacctcaacaaggatgggtggcaagatatagttattggagccccacagtattttgatagagatggagaagttggaggtgcagtgtatgtctacatgaaccagcaaggcagatggaataatgtgaagccaattcgtcttaatggaaccaaagattctatgtttggcattgcagtaaaaaatattggagatattaatcaagatggctacccagatattgcagttggagctccgtatgatgacttgggaaaggtttttatctatcatggatctgcaaatggaataaataccaaaccaacacaggttctcaagggtatatcaccttattttggatattcaattgctggaaacatggaccttgatcgaaattcctaccctgatgttgctgttggttccctctcagattcagtaactattttcagatcccggcctgtgattaatattcagaaaaccatcacagtaactcctaacagaattgacctccgccagaaaacagcgtgtggggcgcctagtgggatatgcctccaggttaaatcctgttttgaatatactgctaaccccgctggttataatccttcaatatcaattgtgggcacacttgaagctgaaaaagaaagaagaaaatctgggctatcctcaagagttcagtttcgaaaccaaggttctgagcccaaatatactcaagaactaactctgaagaggcagaaacagaaagtgtgcatggaggaaaccctgtggctacaggataatatcagagataaactgcgtcccattcccataactgcctcagtggagatccaagagccaagctctcgtaggcgagtgaattcacttccagaagttcttccaattctgaattcagatgaacccaagacagctcatattgatgttcacttcttaaaagagggatgtggagacgacaatgtatgtaacagcaaccttaaactagaatataaattttgcacccgagaaggaaatcaagacaaattttcttatttaccaattcaaaaaggtgtaccagaactagttctaaaagatcagaaggatattgctttagaaataacagtgacaaacagcccttccaacccaaggaatcccacaaaagatggcgatgacgcccatgaggctaaactgattgcaacgtttccagacactttaacctattctgcatatagagaactgagggctttccctgagaaacagttgagttgtgttgccaaccagaatggctcgcaagctgactgtgagctcggaaatccttttaaaagaaattcaaatgtcactttttatttggttttaagtacaactgaagtcacctttgacaccccagatctggatattaatctgaagttagaaacaacaagcaatcaagataatttggctccaattacagctaaagcaaaagtggttattgaactgcttttatcggtctcgggagttgctaaaccttcccaggtgtattttggaggtacagttgttggcgagcaagctatgaaatctgaagatgaagtgggaagtttaatagagtatgaattcagggtaataaacttaggtaaacctcttacaaacctcggcacagcaaccttgaacattcagtggccaaaagaaattagcaatgggaaatggttgctttatttggtgaaagtagaatccaaaggattggaaaaggtaacttgtgagccacaaaaggagataaactccctgaacctaacggagtctcacaactcaagaaagaaacgggaaattactgaaaaacagatagatgataacagaaaattttctttatttgctgaaagaaaataccagactcttaactgtagcgtgaacgtgaactgtgtgaacatcagatgcccgctgcgggggctggacagcaaggcgtctcttattttgcgctcgaggttatggaacagcacatttctagaggaatattccaaactgaactacttggacattctcatgcgagccttcattgatgtgactgctgctgccgaaaatatcaggctgccaaatgcaggcactcaggttcgagtgactgtgtttccctcaaagactgtagctcagtattcgggagtaccttggtggatcatcctagtggctattctcgctgggatcttgatgcttgctttattagtgtttatactatggaagtgtggtttcttcaagagaaataagaaagatcattatgatgccacatatcacaaggctgagatccatgctcagccatctgataaagagaggcttacttctgatgcatagtattgatctacttctgtaattgtgtggattctttaaacgctctaggtacgatgacagtgttccccgataccatgctgtaaggatccggaaagaagagcgagagatcaaagatgaaaagtatattgataaccttgaaaaaaaacagtggatcacaaagtggaacgaaaatgaaagctactcatagcgggggcctaaaaaaaaaaagcttcacagtacccaaactgctttttccaactcagaaattcaatttggatttaaaagcctgctcaatccctgaggactgatttcagagtgactacacacagtacgaacctacagttttaactgtggatattgttacgtagcctaaggctcctgttttgcacagccaaatttaaaactgttggaatggatttttctttaactgccgtaatttaactttctgggttgcctttatttttggcgtggctgacttacatcatgtgttggggaagggcctgcccagttgcactcaggtgacatcctccagatagtgtagctgaggaggcacctacactcacctgcactaacagagtggccgtcctaacctcgggcctgctgcgcagacgtccatcacgttagctgtcccacatcacaagactatgccattggggtagttgtgtttcaacggaaagtgctgtcttaaactaaatgtgcaatagaaggtgatgttgccatcctaccgtcttttcctgtttcctagctgtgtgaatacctgctcacgtcaaatgcatacaagtttcattctccctttcactaaaacacacaggtgcaacagacttgaatgctagttatacttatttgtatatggtatttattttttcttttctttacaaaccattttgttattgactaacaggccaaagagtctccagtttacccttcaggttggtttaatcaatcagaattagagcatgggaggtcatcactttgacctaaattatttactgcaaaaagaaaatctttataaatgtaccagagagagttgttttaataacttatctataaactataacctctccttcatgacagcctccaccccacaacccaaaaggtttaagaaatagaattataactgtaaagatgtttatttcaggcattggatattttttactttagaagcctgcataatgtttctggatttcatactgtaacattcaggaattcttggagaaaatgggtttattcactgaactctagtgcggtttactcactgctgcaaatactgtatattcaggacttgaaagaaatggtgaatgcctatggtggatccaaactgatccagtataagactactgaatctgctaccaaaacagttaatcagtgagtcgatgttctattttttgttttgtttcctcccctatctgtattcccaaaaattactttggggctaatttaacaagaactttaaattgtgttttaattgtaaaaatggcagggggtggaattattactctatacattcaacagagactgaatagatatgaaagctgattttttttaattaccatgcttcacaatgttaagttatatggggagcaacagcaaacaggtgctaatttgttttggatatagtataagcagtgtctgtgttttgaaagaatagaacacagtttgtagtgccactgttgttttgggggggcttttttcttttcggaaatcttaaaccttaagatactaaggacgttgttttggttgtactttggaattcttagtcacaaaatatattttgtttacaaaaatttctgtaaaacaggttataacagtgtttaaagtctcagtttcttgcttggggaacttgtgtccctaatgtgtttagattgctagattgctaaggagctgatactttgacagtgtttttagacctgtgttactaaaaaaaagatgaatgtcctgaaaagggtgttgggagggtggttcaacaaagaaacaaagatgttatggtgtttagatttatggttgttaaaaatgtcatctcaagtcaagtcactggtctgtttgcatttgatacatttttgtactaactagcattgtaaaattatttcatgattagaaattacctgtggatatttgtataaaagtgtgaaataaattttttataaaagtgttcattgtttcgtaacacagcattgtatatgtgaagcaaactctaaaattataaatgacaacctgaattatctatttcatcaaaccaaagttcagtgtttttatttttggtgtctcatgtaatctcagatcagccaaagatactagtgccaaagcaatgggattcggggtttttttctgttttcgctctatgtaggtgatcctcaagtctttcattttccttctttatgattaaaagaaacctacaggtatttaacaacc

SEQ ID NO: 233 - protein, 1073 aa, Homo sapiens
MAAAGQLCLLYLSAGLLSRLGAAFNLDTREDNVIRKYGDPGSLFGFSLAMHWQLQPEDKRLLLVGAPRAEALPLQRANRTGGLYSCDITARGPCTRIEFDNDADPTSESKEDQWMGVTVQSQGPGGKVVTCAHRYEKRQHVNTKQESRDIFGRCYVLSQNLRIEDDMDGGDWSFCDGRLRGHEKFGSCQQGVAATFTKDFHYIVFGAPGTYNWKGIVRVEQKNNTFFDMNIFEDGPYEVGGETEHDESLVPVPANSYLGFSLDSGKGIVSKDEITFVSGAPRANHSGAVVLLKRDMKSAHLLPEHIFDGEGLASSFGYDVAVVDLNKDGWQDIVIGAPQYFDRDGEVGGAVYVYMNQQGRWNNVKPIRLNGTKDSMFGIAVKNIGDINQDGYPDIAVGAPYDDLGKVFIYHGSANGINTKPTQVLKGISPYFGYSIAGNMDLDRNSYPDVAVGSLSDSVTIFRSRPVINIQKTITVTPNRIDLRQKTACGAPSGICLQVKSCFEYTANPAGYNPSISIVGTLEAEKERRKSGLSSRVQFRNQGSEPKYTQELTLKRQKQKVCMEETLWLQDNIRDKLRPIPITASVEIQEPSSRRRVNSLPEVLPILNSDEPKTAHIDVHFLKEGCGDDNVCNSNLKLEYKFCTREGNQDKFSYLPIQKGVPELVLKDQKDIALEITVTNSPSNPRNPTKDGDDAHEAKLIATFPDTLTYSAYRELRAFPEKQLSCVANQNGSQADCELGNPFKRNSNVTFYLVLSTTEVTFDTPDLDINLKLETTSNQDNLAPITAKAKVVIELLLSVSGVAKPSQVYFGGTVVGEQAMKSEDEVGSLIEYEFRVINLGKPLTNLGTATLNIQWPKEISNGKWLLYLVKVESKGLEKVTCEPQKEINSLNLTESHNSRKKREITEKQIDDNRKFSLFAERKYQTLNCSVNVNCVNIRCPLRGLDSKASLILRSRLWNSTFLEEYSKLNYLDILMRAFIDVTAAAENIRLPNAGTQVRVTVFPSKTVAQYSGVPWWIILVAILAGILMLALLVFILWKCGFFKRNKKDHYDATYHKAEIHAQPSDKERLTSDA

SEQ ID NO: 234 - DNA, 3804 bp, Homo sapiens
aacgggacgctttctctgggatgcattgagtcagggaatagaagatggggtgaatgatgtttctgacccacagaccgttgggatgcttttgctgtcactttcccatcatgctgcatgaggcatgacagcagctgtgccattgatgccccagaatagaatcactgaggcttctctccagcagctcctcaatggtgtcgctgtctctccccccagtgatccccccaggggtgcccgatgcccaccccagggaaggagacctgccagtgttccaggaccagatccagcagcccagcaccgaggagggggccatggcagagagagtggagtccgaggggagtgacgaggaagcagaagacgaagggtcccagctggtggttttggacccagaccaccccctgatggtaagattccaggctgccctgaagaactacctgaaccgacagatcgaaaagttgaagctggacctccaagagctggttgtggctaccaagcagagccgagcccagcggcaggagctgggggtgaatctctatgaggtgcagcagcacctggtacacctgcagaagctgctggagaagagtcacgaccgccacgcaatggcctcgagcgagcgcaggcagaaggaggaggagctgcaggccgcccgcgctctctacaccaagacctgcgcagccgccaacgaggagcgcaaaaagttggcggctctgcagactgagatggagaacttggccctgcatctcttctacatgcagaacatcgaccaggacatgcgtgacgacatccgcgtgatgacacaagtggtaaagaaggccgagacggagaggatccgggcagaaatcgagaagaaaaagcaggacctgtatgtggaccagctcaccactcgagcccagcaactggaagaagacattgccctgtttgaggctcagtacttggcccaagctgaggacacccggattttaaggaaagcagtgagtgaggcctgcaccgagatcgacgccatcagcgtggagaagaggcgcatcatgcagcaatgggccagcagcctggtgggcatgaagcaccgcgacgaggcgcacagggcggtgctggaggcgctcagaggatgccagcatcaagccaaatccaccgacggcgagattgaggcctataagaaatccatcatgaaggaggaagaaaagaacgagaagctggcgagcatcctgaaccggacagagacggaagccacactgctgcagaagctcaccacccagtgcctgaccaagcaggtggccctgcagagccagttcaatacctacaggctcaccctgcaggacacagaggatgccctcagccaggaccagctggaacaaatgatactcacggaggagttgcaggccatccgccaagccatccagggcgagctggagctcaggaggaagacggatgctgccatccgggagaagctgcaggagcacatgacctccaacaagaccaccaaatacttcaaccagctcatcctgaggctgcagaaggagaagaccaacatgatgacacatctttccaaaatcaacggtgacattgcccagaccaccctggacatcacacacaccagcagcaggctggacgcacaccagaagaccctggtggagctggaccaggacgtgaagaaagtcaacgagctcatcaccaacagccagagcgagatctcccggcgcacgatcctgatcgagaggaagcaagggctcatcaacttcctcaacaagcagctggagcggatggtctccgagctggggggggaagaagtggggcccctggagcttgaaatcaaaaggctgagcaagctgatcgacgagcacgatggcaaggcggtccaggcccaggtgacctggctgcgcctgcagcaggagatggtcaaggtgacacaggagcaggaggagcagctggcctccctggacgcatccaagaaggagctccacatcatggagcagaagaaactacgagtagaaagcaagattgagcaggagaagaaggagcagaaggagatcgagcaccacatgaaggacctggacaacgacctgaagaagctcaacatgttgatgaataaaaaccggtgcagctcggaggagctggagcagaacaaccgggtgacagagaatgagttcgtgcgctcgctgaaggcctctgagagggagaccatcaagatgcaggacaagctgaaccagctcagcgaggagaaggcgaccctcctgaatcaactggtggaagcagaacaccagattatgctttgggagaaaaaaatccaactggcaaaagagatgcgttcctcagtggattccgagatcggccagacggagatccgggccatgaagggcgagatccacaggatgaaggtcaggctcgggcagctgctgaagcagcaggagaagatgatccgtgccatggagttggcggttgcccgcagagagaccgtcaccacccaggccgaggggcagcgcaagatggacaggaaggcgctcacccgcaccgacttccaccacaagcagcttgagctgcgccggaaaatcagggacgttcgcaaggccaccgatgagtgcaccaaaaccgtcctggaactggaagaaacacaaagaaatgtgagcagctccctcctagagaagcaggaaaagctgtcggtgattcaggcagacttcgacacactcgaggccgacctcacccggcttggggccctcaaacgacagaacctttcagagatcgtggccctgcagacacgccttaagcacctgcaggctgtgaaggaggggcgctacgtgttcctgttccgctccaagcagtccctagtgctggagcgccagcgcctggacaagcgactggctctcatcgccaccatcctggaccgcgtgcgggacgagtacccccagttccaggaggccctgcacaaggtcagccagatgatcgccaacaagctcgagtcaccagggccctcctagggagcagcctggactccgccttgcaaggcctccaggaagagatccggaattgtgtttgtcatgagggacttggaatcttttgtgttcctaaaaaccacatgtaccctcagaagggcatcgtttaagagaaataagccagccccacccataggaatctttttagccactcagcaatttaataaaccaggtaaaatcctagcgtttcccatggcatcccatcgcaaagacagagcctgtgactgcagacccacacacccacactcccacactgggcttactcgtccaggtaacactttggtttgcagcactcccaaatctgcacgtgcctctcacaacacaacgctgccacaggtccacaagctggtgggctgagcagaggtgggaaagttaaggcagctccagccagcctggcccgggaggctggtccccccagcacttccctctactaggtgcatctgaaaacccacaaaccaccttctttaccagttttcccatccccaccccttagaactctcaggtcccttttcctgcccccatgtccccatttgagttaaattcagatccacagcttgcaggagaaagtcagtggccccagacacacgtaacagggtgagcactgaaataagagcacgctggggcgtccacaccaagggactacgccccagtctgcccacctatcttttctccatcattaacccagcgctctttctccctggacttccaagtaccaatgaccttggggcttctttgcagtttaaagggaaaatgctctacaaaataatttcactttcaaacatttcagcagaagaataaaatcttttttctgaatatctagtaa

SEQ ID NO: 235 - protein, 925 aa, Homo sapiens
MVSLSLPPVIPPGVPDAHPREGDLPVFQDQIQQPSTEEGAMAERVESEGSDEEAEDEGSQLVVLDPDHPLMVRFQAALKNYLNRQIEKLKLDLQELVVATKQSRAQRQELGVNLYEVQQHLVHLQKLLEKSHDRHAMASSERRQKEEELQAARALYTKTCAAANEERKKLAALQTEMENLALHLFYMQNIDQDMRDDIRVMTQVVKKAETERIRAEIEKKKQDLYVDQLTTRAQQLEEDIALFEAQYLAQAEDTRILRKAVSEACTEIDAISVEKRRIMQQWASSLVGMKHRDEAHRAVLEALRGCQHQAKSTDGEIEAYKKSIMKEEEKNEKLASILNRTETEATLLQKLTTQCLTKQVALQSQFNTYRLTLQDTEDALSQDQLEQMILTEELQAIRQAIQGELELRRKTDAAIREKLQEHMTSNKTTKYFNQLILRLQKEKTNMMTHLSKINGDIAQTTLDITHTSSRLDAHQKTLVELDQDVKKVNELITNSQSEISRRTILIERKQGLINFLNKQLERMVSELGGEEVGPLELEIKRLSKLIDEHDGKAVQAQVTWLRLQQEMVKVTQEQEEQLASLDASKKELHIMEQKKLRVESKIEQEKKEQKEIEHHMKDLDNDLKKLNMLMNKNRCSSEELEQNNRVTENEFVRSLKASERETIKMQDKLNQLSEEKATLLNQLVEAEHQIMLWEKKIQLAKEMRSSVDSEIGQTEIRAMKGEIHRMKVRLGQLLKQQEKMIRAMELAVARRETVTTQAEGQRKMDRKALTRTDFHHKQLELRRKIRDVRKATDECTKTVLELEETQRNVSSSLLEKQEKLSVIQADFDTLEADLTRLGALKRQNLSEIVALQTRLKHLQAVKEGRYVFLFRSKQSLVLERQRLDKRLALIATILDRVRDEYPQFQEALHKVSQMIANKLESPGPS

SEQ ID NO: 236 - DNA, 3478 bp, Homo sapiens
atgttgacagcgtcgcctagcaacgggaaatggcggaaccgggcggcgcggcgggccggtcccatccggaagatggatcggcttctgagggagagaaggaagggaataatgaaagccacatggtgtcaccaccagagaaggatgatggccagaaaggtgaagaagctgtcggtagcacagagcatcctgaggaagtcacaacccaagcggaagctgcaattgaagagggggaggtggagacagaaggggaagcagcagtggaaggggaagaggaggctgtgtcctatggagatgctgaaagcgaagaggaatattactatacagaaacttcatccccggaagggcaaatcagtgctgcagatacgacttacccgtatttcagtcctcctcaggaactgcctggagaggaggcatacgatagtgttagcggggaggctggtctccaaggcttccagcaagaggccaccggtccaccagaatccagagaaaggagggtcacctccccagagccatcccacggagtcttaggcccgtcggagcaaatgggccaggtcacctctgggccagcagtgggcagattgacaggatccacagaggagccccaggggcaggtgctcccaatgggcgtccagcaccgcttccggctgagccacgggagcgacatcgagtcctcagacctggaggagttcgtctcgcaggagccagtgatccccccaggggtgcccgatgcccaccccagggaaggagacctgccagtgttccaggaccagatccagcagcccagcaccgaggagggggccatggcagagagagtggagtccgaggggagtgacgaggaagcagaagacgaagggtcccagctggtggttttggacccagaccaccccctgatggtaagattccaggctgccctgaagaactacctgaaccgacagatcgaaaagttgaagctggacctccaagagctggttgtggctaccaagcagagccgagcccagcggcaggagctgggggtgaatctctatgaggtgcagcagcacctggtacacctgcagaagctgctggagaagagtcacgaccgccacgcaatggcctcgagcgagcgcaggcagaaggaggaggagctgcaggccgcccgcgctctctacaccaagacctgcgcagccgccaacgaggagcgcaaaaagttggcggctctgcagactgagatggagaacttggccctgcatctcttctacatgcagaacatcgaccaggacatgcgtgacgacatccgcgtgatgacacaagtggtaaagaaggccgagacggagaggatccgggcagaaatcgagaagaaaaagcaggacctgtatgtggaccagctcaccactcgagcccagcaactggaagaagacattgccctgtttgaggctcagtacttggcccaagctgaggacacccggattttaaggaaagcagtgagtgaggcctgcaccgagatcgacgccatcagcgtggagaagaggcgcatcatgcagcaatgggccagcagcctggtgggcatgaagcaccgcgacgaggcgcacagggcggtgctggaggcgctcagaggatgccagcatcaagccaaatccaccgacggcgagattgaggcctataagaaatccatcatgaaggaggaagaaaagaacgagaagctggcgagcatcctgaaccggacagagacggaagccacactgctgcagaagctcaccacccagtgcctgaccaagcaggtggccctgcagagccagttcaatacctacaggctcaccctgcaggacacagaggatgccctcagccaggaccagctggaacaaatgatactcacggaggagttgcaggccatccgccaagccatccagggcgagctggagctcaggaggaagacggatgctgccatccgggagaagctgcaggagcacatgacctccaacaagaccaccaaatacttcaaccagctcatcctgaggctgcagaaggagaagaccaacatgatgacacatctttccaaaatcaacggtgacattgcccagaccaccctggacatcacacacaccagcagcaggctggacgcacaccagaagaccctggtggagctggaccaggacgtgaagaaagtcaacgagctcatcaccaacagccagagcgagatctcccggcgcacgatcctgatcgagaggaagcaagggctcatcaacttcctcaacaagcagctggagcggatggtctccgagctggggggggaagaagtggggcccctggagcttgaaatcaaaaggctgagcaagctgatcgacgagcacgatggcaaggcggtccaggcccaggtgacctggctgcgcctgcagcaggagatggtcaaggtgacacaggagcaggaggagcagctggcctccctggacgcatccaagaaggagctccacatcatggagcagaagaaactacgagtagaaagcaagattgagcaggagaagaaggagcagaaggagatcgagcaccacatgaaggacctggacaacgacctgaagaagctcaacatgttgatgaataaaaaccggtgcagctcggaggagctggagcagaacaaccgggtgacagagaatgagttcgtgcgctcgctgaaggcctctgagagggagaccatcaagatgcaggacaagctgaaccagctcagcgaggagaaggcgaccctcctgaatcaactggtggaagcagaacaccagattatgctttgggagaaaaaaatccaactggcaaaagagatgcgttcctcagtggattccgagatcggccagacggagatccgggccatgaagggcgagatccacaggatgaagaaatattgcagaacaacacaggacgcacacaggcacgtgcacgaacaacacgggacgcacgcaggcacgtgcacgaagaacacgggacgcgcgcaggcacgtgcacgaacaacacgggacgcgcgcgggcacgtgcacgaacaacacgggacgcgcgcaggcacgtgcacgaacaacacgggacgcgcgcaggcacgtgcacgaacaagggacgcgcgcaggcacgtgcacgaacacaggacacacacagcacgtgcatgaacaacacaggacacacacaagcacgtgcatgtcatctcacaaaacgctgttttattcctactccatgtaatcacagcacgctggtatttttaaatgccggttgtaaccctcaaactttgtgaccctctaacgtatcccactgtgagacagtctcacaccacagaagggctcagagagcacccccatctcatccttcacagccgcgttgtctctccatggtcacaattagatttcattgcctttaaaaggctggtaattaaattgcaagtggtcatcaagctaaaggttcagggccttaaggataacagtaagagcagttcataaaataaatgggcctcactttcaccatgccatgc

SEQ ID NO: 237 - protein, 1030 aa, Homo sapiens
MAEPGGAAGRSHPEDGSASEGEKEGNNESHMVSPPEKDDGQKGEEAVGSTEHPEEVTTQAEAAIEEGEVETEGEAAVEGEEEAVSYGDAESEEEYYYTETSSPEGQISAADTTYPYFSPPQELPGEEAYDSVSGEAGLQGFQQEATGPPESRERRVTSPEPSHGVLGPSEQMGQVTSGPAVGRLTGSTEEPQGQVLPMGVQHRFRLSHGSDIESSDLEEFVSQEPVIPPGVPDAHPREGDLPVFQDQIQQPSTEEGAMAERVESEGSDEEAEDEGSQLVVLDPDHPLMVRFQAALKNYLNRQIEKLKLDLQELVVATKQSRAQRQELGVNLYEVQQHLVHLQKLLEKSHDRHAMASSERRQKEEELQAARALYTKTCAAANEERKKLAALQTEMENLALHLFYMQNIDQDMRDDIRVMTQVVKKAETERIRAEIEKKKQDLYVDQLTTRAQQLEEDIALFEAQYLAQAEDTRILRKAVSEACTEIDAISVEKRRIMQQWASSLVGMKHRDEAHRAVLEALRGCQHQAKSTDGEIEAYKKSIMKEEEKNEKLASILNRTETEATLLQKLTTQCLTKQVALQSQFNTYRLTLQDTEDALSQDQLEQMILTEELQAIRQAIQGELELRRKTDAAIREKLQEHMTSNKTTKYFNQLILRLQKEKTNMMTHLSKINGDIAQTTLDITHTSSRLDAHQKTLVELDQDVKKVNELITNSQSEISRRTILIERKQGLINFLNKQLERMVSELGGEEVGPLELEIKRLSKLIDEHDGKAVQAQVTWLRLQQEMVKVTQEQEEQLASLDASKKELHIMEQKKLRVESKIEQEKKEQKEIEHHMKDLDNDLKKLNMLMNKNRCSSEELEQNNRVTENEFVRSLKASERETIKMQDKLNQLSEEKATLLNQLVEAEHQIMLWEKKIQLAKEMRSSVDSEIGQTEIRAMKGEIHRMKKYCRTTQDAHRHVHEQHGTHAGTCTKNTGRAQARARTTRDARGHVHEQHGTRAGTCTNNTGRAQARARTRDARRHVHEHRTHTARA

SEQ ID NO: 238 - DNA, 2380 bp, Homo sapiens
atgttgacagcgtcgcctagcaacgggaaatggcggaaccgggcggcgcggcgggccggtcccatccggaagatggatcggcttctgagggagagaaggaagggaataatgaaagccacatggtgtcaccaccagagaaggatgatggccagaaaggtgaagaagctgtcggtagcacagagcatcctgaggaagtcacaacccaagcggaagctgcaattgaagagggggaggtggagacagaaggggaagcagcagtggaaggggaagaggaggctgtgtcctatggagatgctgaaagcgaagaggaatattactatacagaaacttcatccccggaagggcaaatcagtgctgcagatacgacttacccgtatttcagtcctcctcaggaactgcctggagaggaggcatacgatagtgttagcggggaggctggtctccaaggcttccagcaagaggccaccggtccaccagaatccagagaaaggagggtcacctccccagagccatcccacggagtcttaggcccgtcggagcaaatgggccaggtcacctctgggccagcagtgggcagattgacaggatccacagaggagccccaggggcaggtgctcccaatgggcgtccagcaccgcttccggctgagccacgggagcgacatcgagtcctcagacctggaggagttcgtctcgcaggagccagtgatccccccaggggtgcccgatgcccaccccagggaaggagacctgccagtgttccaggaccagatccagcagcccagcaccgaggagggggccatggcagagagagtggagtccgaggggagtgacgaggaagcagaagacgaagggtcccagctggtggttttggacccagaccaccccctgatggtaagattccaggctgccctgaagaactacctgaaccgacagatcgaaaagttgaagctggacctccaagagctggttgtggctaccaagcagagccgagcccagcggcaggagctgggggtgaatctctatgaggtgcagcagcacctggtacacctgcagaagctgctggagaagagtcacgaccgccacgcaatggcctcgagcgagcgcaggcagaaggaggaggagctgcaggccgcccgcgctctctacaccaagacctgcgcagccgccaacgaggagcgcaaaaagttggcggctctgcagactgagatggagaacttggccctgcatctcttctacatgcagaacatcgaccaggacatgcgtgacgacatccgcgtgatgacacaagtggtaaagaaggccgagacggagaggatccgggcagaaatcgagaagaaaaagcaggacctgtatgtggaccagctcaccactcgagcccagcaactggaagaagacattgccctgtttgaggctcagtacttggcccaagctgaggacacccggattttaaggaaagcagtgagtgaggcctgcaccgagatcgacgccatcagcgtggagaagaggcgcatcatgcagcaatgggccagcagcctggtgggcatgaagcaccgcgacgaggcgcacagggcggtgctggaggcgctcagcgtgtccctagagcgcttcccaagtcaaaatataaacaccgctcgttcccgcctttctaccacatggcattccgctgggatacttctacggggaagcttcctgcccggggcatcgagggcgttcgcgtccgtctgttatggcggtgctgctgtagataaccggatccgcgaatgctaacgctcaccaggatgctatatagccttttttatattgcctatcaagcccggaatgtctgggtctagcgggtattgctaagtaggattgtgacagtcacgcccccggcagcggtgtttcaaagtcccctgacagctcagcatgttgtcacacttcaggactgtgccaatccgattgatgaagaaaatagataatcttgttttataaaacgtgcatgcgcagaatgttgagtgaatattttagtggactatgtacacgcacaaacacttcacaacgagtgagagagcctctgacttcacctgcagcttgccacaccaaggccccggggaggagtgaggcccaacttttatttattatatttttgtggttcttgcaatggagtctcgctctgtcccccaggctggagtgcagtggcaccatctctgctcactgcgacctccgcctcctgggttcaagcgattctcctgcctcagcctcccaagtagctgggattacaggcgtgcaccaccacgcctggctaatttttgtatttttagtagagacggggtttcaccatgtgggccaggctgatcttgaacccctacctcaggtgatccacccgtcttggcctccca

SEQ ID NO: 239 - protein, 579 aa, Homo sapiens
MAEPGGAAGRSHPEDGSASEGEKEGNNESHMVSPPEKDDGQKGEEAVGSTEHPEEVTTQAEAAIEEGEVETEGEAAVEGEEEAVSYGDAESEEEYYYTETSSPEGQISAADTTYPYFSPPQELPGEEAYDSVSGEAGLQGFQQEATGPPESRERRVTSPEPSHGVLGPSEQMGQVTSGPAVGRLTGSTEEPQGQVLPMGVQHRFRLSHGSDIESSDLEEFVSQEPVIPPGVPDAHPREGDLPVFQDQIQQPSTEEGAMAERVESEGSDEEAEDEGSQLVVLDPDHPLMVRFQAALKNYLNRQIEKLKLDLQELVVATKQSRAQRQELGVNLYEVQQHLVHLQKLLEKSHDRHAMASSERRQKEEELQAARALYTKTCAAANEERKKLAALQTEMENLALHLFYMQNIDQDMRDDIRVMTQVVKKAETERIRAEIEKKKQDLYVDQLTTRAQQLEEDIALFEAQYLAQAEDTRILRKAVSEACTEIDAISVEKRRIMQQWASSLVGMKHRDEAHRAVLEALSVSLERFPSQNINTARSRLSTTWHSAGILLRGSFLPGASRAFASVCYGGAAVDNRIREC

SEQ ID NO: 240 - DNA, 3478 bp, Homo sapiens
atgttgacagcgtcgcctagcaacgggaaatggcggaaccgggcggcgcggcgggccggtcccatccggaagatggatcggcttctgagggagagaaggaagggaataatgaaagccacatggtgtcaccaccagagaaggatgatggccagaaaggtgaagaagctgtcggtagcacagagcatcctgaggaagtcacaacccaagcggaagctgcaattgaagagggggaggtcgagacagaaggggaagcagcagtggaaggggaagaggaggctgtgtcctatggagatgctgaaagcgaagaggaatattactatacagaaacttcatccccggaagggcaaatcagtgctgcagatacgacttacccgtatttcagtcctcctcaggaactgcctggagaggaggcatacgatagtgttagcggggaggctggtctccaaggcttccagcaagaggccaccggtccaccagaatccagagaaaggagggtcacctccccagagccatcccacggagtcttaggcccgtcggagcaaatgggccaggtcacctctgggccagcagtgggcagattgacaggatccacagaggagccccaggggcaggtgctcccaatgggcgtccagcaccgcttccggctgagccacgggagcgacatcgagtcctcagacctggaggagttcgtctcgcaggagccagtgatccccccaggggtgcccgatgcccaccccagggaaggagacctgccagtgttccaggaccagatccagcagcccagcaccgaggagggggccatggcagagagagtggagtccgaggggagtgacgaggaagcagaagacgaagggtcccagctggtggttttggacccagaccaccccctgatggtaagattccaggctgccctgaagaactacctgaaccgacagatcgaaaagttgaagctggacctccaagagctggttgtggctaccaagcagagccgagcccagcggcaggagctgggggtgaatctctatgaggtgcagcagcacctggtacacctgcagaagctgctggagaagagtcacgaccgccacgcaatggcctcgagcgagcgcaggcagaaggaggaggagctgcaggccgcccgcgctctctacaccaagacctgcgcagccgccaacgaggagcgcaaaaagttggcggctctgcagactgagatggagaacttggccctgcatctcttctacatgcagaacatcgaccaggacatgcgtgacgacatccgcgtgatgacacaagtggtaaagaaggccgagacggagaggatccgggcagaaatcgagaagaaaaagcaggacctgtatgtggaccagctcaccactcgagcccagcaactggaagaagacattgccctgtttgaggctcagtacttggcccaagctgaggacacccggattttaaggaaagcagtgagtgaggcctgcaccgagatcgacgccatcagcgtggagaagaggcgcatcatgcagcaatgggccagcagcctggtgggcatgaagcaccgcgacgaggcgcacagggcggtgctggaggcgctcagaggatgccagcatcaagccaaatccaccgacggcgagattgaggcctataagaaatccatcatgaaggaggaagaaaagaacgagaagctggcgagcatcctgaaccggacagagacggaagccacactgctgcagaagctcaccacccagtgcctgaccaagcaggtggccctgcagagccagttcaatacctacaggctcaccctgcaggacacagaggatgccctcagccaggaccagctggaacaaatgatactcacggaggagttgcaggccatccgccaagccatccagggcgagctggagctcaggaggaagacggatgctgccatccgggagaagctgcaggagcacatgacctccaacaagaccaccaaatacttcaaccagctcatcctgaggctgcagaaggagaagaccaacatgatgacacatctttccaaaatcaacggtgacattgcccagaccaccctggacatcacacacaccagcagcaggctggacgcacaccagaagaccctggtggagctggaccaggacgtgaagaaagtcaacgagctcatcaccaacagccagagcgagatctcccggcgcacgatcctgatcgagaggaagcaagggctcatcaacttcctcaacaagcagctggagcggatggtctccgagctggggggggaagaagtggggcccctggagcttgaaatcaaaaggctgagcaagctgatcgacgagcacgatggcaaggcggtccaggcccaggtgacctggctgcgcctgcagcaggagatggtcaaggtgacacaggagcaggaggagcagctggcctccctggacgcatccaagaaggagctccacatcatggagcagaagaaactacgagtagaaagcaagattgagcaggagaagaaggagcagaaggagatcgagcaccacatgaaggacctggacaacgacctgaagaagctcaacatgttgatgaataaaaaccggtgcagctcggaggagctggagcagaacaaccgggtgacagagaatgagttcgtgcgctcgctgaaggcctctgagagggagaccatcaagatgcaggacaagctgaaccagctcagcgaggagaaggcgaccctcctgaatcaactggtggaagcagaacaccagattatgctttgggagaaaaaaatccaactggcaaaagagatgcgttcctcagtggattccgagatcggccagacggagatccgggccatgaagggcgagatccacaggatgaagaaatattgcagaacaacacaggacgcacacaggcacgtgcacgaacaacacgggacgcacgcaggcacgtgcacgaagaacacgggacgcgcgcaggcacgtgcacgaacaacacgggacgcgcgcgggcacgtgcacgaacaacacgggacgcgcgcaggcacgtgcacgaacaacacgggacgcgcgcaggcacgtgcacgaacaagggacgcgcgcaggcacgtgcacgaacacaggacacacacagcacgtgcatgaacaacacaggacacacacaagcacgtgcatgtcatctcacaaaacgctgttttattcctactccatgtaatcacagcacgctggtatttttaaatgccggttgtaaccctcaaactttgtgaccctctaacgtatcccactgtgagacagtctcacaccacagaagggctcagagagcacccccatctcatccttcacagccgcgttgtctctccatggtcacaattagatttcattgcctttaaaaggctggtaattaaattgcaagtggtcatcaagctaaaggttcagggccttaaggataacagtaagagcagttcataaaataaatgggcctcactttcaccatgccatgc

SEQ ID NO: 241 - protein, 1030 aa, Homo sapiens; identical to SEQ ID NO: 237

SEQ ID NO: 242 - DNA, 3804 bp, Homo sapiens; identical to SEQ ID NO: 234

SEQ ID NO: 243 - protein, 925 aa, Homo sapiens; identical to SEQ ID NO: 235

SEQ ID NO: 244 - DNA, 1968 bp, Homo sapiens
aatgtgtgcgcgctgtggtatgggtgtgcaagtgtgcgaaggcggcgtgttgtgtgagcgagagggtagcggatgtgtgtgtgcgtgtgcgcgcgtggctccgggtgtgcgccgctgcgatagcgggtcctttcccggggcgggcgacgggcgggctgggaaggtctcctcccctcaccacattgagaaatctcagtgagtcaccgagtggttctgcatattaatgagctcgctcgctgcgagggcaggagcggatttaaaagaggccagggcgggcggagggaggctgtggagagagcgcggagacaagcgcagagcgcagcgcacggccacagacagccctgggcatccaccgacggcgcagccggagccagcagagccggaaggcgcgccccgggcagagaaagccgagcagagctgggtggcgtctccgggccgccgctccgacgggccagcgccctccccatgtccctgctcccacgccgcgcccctccggtcagcatgaggctcctggcggccgcgctgctcctgctgctgctggcgctgtacaccgcgcgtgtggacgggtccaaatgcaagtgctcccggaagggacccaagatccgctacagcgacgtgaagaagctggaaatgaagccaaagtacccgcactgcgaggagaagatggttatcatcaccaccaagagcgtgtccaggtaccgaggtcaggagcactgcctgcaccccaagctgcagagcaccaagcgcttcatcaagtggtacaacgcctggaacgagaagcgcagggtctacgaagaatagggtgaaaaacctcagaagggaaaactccaaaccagttgggagacttgtgcaaaggactttgcagattaaaaaaaaaaaaaaaaaaaaaaaaaaaaaaaaaaaaaaaaaagcctttctttctcacaggcataagacacaaattatatattgttatgaagcactttttaccaacggtcagtttttacattttatagctgcgtgcgaaaggcttccagatgggagacccatctctcttgtgctccagacttcatcacaggctgctttttatcaaaaaggggaaaactcatgcctttcctttttaaaaaatgcttttttgtatttgtccatacgtcactatacatctgagctttataagcgcccgggaggaacaatgagcttggtggacacatttcattgcagtgttgctccattcctagcttgggaagcttccgcttagaggtcctggcgcctcggcacagctgccacgggctctcctgggcttatggccggtcacagcctcagtgtgactccacagtggcccctgtagccgggcaagcaggagcaggtctctctgcatctgttctctgaggaactcaagtttggttgccagaaaaatgtgcttcattcccccctggttaatttttacacaccctaggaaacatttccaagatcctgtgatggcgagacaaatgatccttaaagaaggtgtggggtctttcccaacctgaggatttctgaaaggttcacaggttcaatatttaatgcttcagaagcatgtgaggttcccaacactgtcagcaaaaaccttaggagaaaacttaaaaatatatgaatacatgcgcaatacacagctacagacacacattctgttgacaagggaaaaccttcaaagcatgtttctttccctcaccacaacagaacatgcagtactaaagcaatatatttgtgattccccatgtaattcttcaatgttaaacagtgcagtcctctttcgaaagctaagatgaccatgcgccctttcctctgtacatatacccttaagaacgccccctccacacactgccccccagtatatgccgcattgtactgctgtgttatatgctatgtacatgtcagaaaccattagcattgcatgcaggtttcatattctttctaagatggaaagtaataaaatatatttgaaatgta

SEQ ID NO: 245 - protein, 111 aa, Homo sapiens
MSLLPRRAPPVSMRLLAAALLLLLLALYTARVDGSKCKCSRKGPKIRYSDVKKLEMKPKYPHCEEKMVIITTKSVSRYRGQEHCLHPKLQSTKRFIKWYNAWNEKRRVYEE

SEQ ID NO: 246 - DNA, 1443 bp, Homo sapiens
gtggctgcagcagcagcggcggcggaaaccctaaagtccgagtccggactacgagtgcgtggcctcctaatccggatcctagtcctgagcgtgtctgtgtgcgagtggacggtcccggacgcgatgaccctgaacggcggcggcagcggagcgggcgggagccgcggtgggggccaggagcgcgagcgccgtcggggcagcacaccctggggccccgccccgccgctgcaccgccgcagcatgccggtggacgagcgcgacctgcaggcggcgctgaccccgggtgccctgacggcggccgcggccgggacggggacccagggtcccaggctggactggcccgaggactccgaggactcgctcagctcagggggcagcgactcagacgagagcgtttacaaggtgctgctgctgggggcgcccggcgtgggcaagagcgccctggcgcgcatcttcggcggtgtggaggacgggcctgaagcagaggcagcagggcacacctatgatcgctccattgtagtggacggagaagaggcatcactcatggtctacgacatttgggagcaggacgggggccgctggttgcccggccactgcatggccatgggggatgcctatgtcattgtgtactcagtgacggacaagggcagcttcgagaaggcctcagaactgcgggtccagctgcggcgtgcacggcaaacagatgatgtgcccatcatcctcgtgggcaacaagagcgacctggtgcgctctcgtgaggtctcggtggatgagggccgggcctgcgcggtggtctttgactgcaagttcattgagacatcagcggcattgcaccacaatgtccaggcgctgtttgaaggtgtcgtgcgccagatacgcctgcgcagggacagcaaagaagccaacgcacgacggcaagcaggcacccggaggcgagagagccttggcaaaaaggcgaagcgcttcttgggccgcatcgtagctcgtaacagccgcaagatggcctttcgcgccaaatccaagtcctgccacgacctctcggttctctaggtcccacccgctcccactatggtgggagacgaacggaagggttggtgggctggcccagccaactgccccgggtgcctcagagcaggctcagactctgggtccctcggagctgccagccgggcacccccaacctcatggtcatggacagatagacagtgctgccctgcgaagtggctctcaggggccagtgagggctgggcccacagagatgcatgcgcaggctcatatgcgtcccaagcagccgcagcgcagccgccgggcaggcctgcgtgccgggagaggactctgccttttttcacagcccgggtgtgcctgccctggagggaggctcttcagtgcggtagctacttgtttacatgcagatttttgtaataaaggctatttcctgataaa

SEQ ID NO: 247 - protein, 308 aa, Homo sapiens
MTLNGGGSGAGGSRGGGQERERRRGSTPWGPAPPLHRRSMPVDERDLQAALTPGALTAAAAGTGTQGPRLDWPEDSEDSLSSGGSDSDESVYKVLLLGAPGVGKSALARIFGGVEDGPEAEAAGHTYDRSIVVDGEEASLMVYDIWEQDGGRWLPGHCMAMGDAYVIVYSVTDKGSFEKASELRVQLRRARQTDDVPIILVGNKSDLVRSREVSVDEGRACAVVFDCKFIETSAALHHNVQALFEGVVRQIRLRRDSKEANARRQAGTRRRESLGKKAKRFLGRIVARNSRKMAFRAKSKSCHDLSVL

SEQ ID NO: 248 - DNA, 2492 bp, Homo sapiens
cccgcccacctcccccgtcggcccggccgtcccccggcgccggggagctccgggccgcccatgatgggctccgtgctcccggctgaggccctggtgctcaagaccgggctgaaggcgccgggactggcgctggccgaggttatcacctccgacatcctgcacagcttcctgtacggccgctggcgcaacgtgctcggggagcagctcttcgaggacaagagccaccacgccagccccaagacagccttcaccgccgaggtgctggcgcagtccttctccggcgaagtgcagaagctgtccagcctggtgctgcctgcggaggtgatcatcgctcagagctccatccctggcgagggcctcggcatcttctccaagacgtggatcaaggcgggaaccgagatgggccccttcaccggccgcgtgatcgccccggagcacgtggacatctgcaagaacaacaacctcatgtgggaggtgttcaatgaggatggcacggtgcgctacttcatcgatgccagccaggaggaccaccggagctggatgacctacatcaagtgtgcacgtaacgaacaggagcagaacctggaggtggtccagatcggcaccagcatcttctacaaggccattgagatgatcccacctgaccaggaactgctggtgtggtacggaaactcacacaacaccttcctggggatcccaggtgtgcccgggctagaggaggaccagaaaaagaacaagcatgaggacttccacccggcggactcggcggctggccccgcgggccgcatgcgatgcgtcatctgccaccgcggcttcaactcgcgcagcaacctgcgctcgcacatgcgcatccacacgctggacaagcccttcgtgtgccgcttctgcaaccgccgcttcagccagtcgtccacgctgcgcaaccacgtgcgcctgcacacgggcgagcgcccctacaagtgccaggtgtgccagagcgcctactcgcagctggccggcctgcgcgcccaccagaagagcgcgcggcaccggccgcccagcaccgcgctgcaggcacactcgcccgcgctgcccgccccgcacgcgcacgcgcccgcgctcgccgccgccgccgccgccgccgccgccgccgccgcgcaccacctgccggccatggtgctgtgagcgcgcccgcgcccccgccgggccccgcgcgctcctgggtccccggcaccccggccccgcagcgcgactcgccctccagccccaacccccggcccggcgccgccgcggagccccgcgcgctggggttgcgccccggaggcggatctcaggcacccccgccttggcccgtgtcgcagatgaggacactgagggcggcgtccctcacccaggccacgcagctggtgcggctgttcggccgcctcctctgggagggggtccccctgcctggcctcgcccccgagtctccctgctgctgtagagccgggcgcccaggccggcatccccctcgtgggtggcaggagagcggacttagagcccccgagggcccctcagcagaggaaggggagtcccctcctccgccaccgagagtcctgtgcttcggaatgaagggagggcgacctccttgtccgggtgtggtcgggcgcgggggttgtgggggcgccatctcctcttccggcccctgggactggtgtcctgaagtgtcgggagtccttacgcaaccttgacatgtgcgggctactggggtccatcggcagcgggaagagacccggagagatgcatcttctgggcccttctctcctttaggccagcttacccccaaacctggctcctggggacggatgaggaaggagctctttgcagtgcaccaggcacgttgagagtggaggcacaatggaaatcctctgtgggaccccgagcaagaccctgcacctctttgggcctcagtttccccatctgtaaaatgaaggagttggaccaatgccccctccccttcagctgtgacatcgtgcctgggaaggcgaaatatacccccagccccttccaacacacacactccagcgagaggagggcaagactggaaccgctgcccgagaggttaaggtggcttctgtggccacgaagcgcttccgagctgtgcccagtcccgggaattccgcccagtctgcccacacttccctcggtccctgcccgtttcctcaaattcgggccgtgcgcgccctctggtgtcgcctctcacactttgcagtcatttaccaggattcccgtagggcgttttgtaaaataaactataatattaatgaaaagtataaaatgtatagagttttcaagaaactgcgttctacttccagaagatggtcactttaaccttgtaaatatttatctaaaatgatatttacaaaactgtaatatattattatttgattgtatatgtacaactgtaaatacatttgtacctctcttgtattctaaaataaaaattacttggaacatttatcatttagcatctg

SEQ ID NO: 249 - protein, 367 aa, Homo sapiens
MMGSVLPAEALVLKTGLKAPGLALAEVITSDILHSFLYGRWRNVLGEQLFEDKSHHASPKTAFTAEVLAQSFSGEVQKLSSLVLPAEVIIAQSSIPGEGLGIFSKTWIKAGTEMGPFTGRVIAPEHVDICKNNNLMWEVFNEDGTVRYFIDASQEDHRSWMTYIKCARNEQEQNLEVVQIGTSIFYKAIEMIPPDQELLVWYGNSHNTFLGIPGVPGLEEDQKKNKHEDFHPADSAAGPAGRMRCVICHRGFNSRSNLRSHMRIHTLDKPFVCRFCNRRFSQSSTLRNHVRLHTGERPYKCQVCQSAYSQLAGLRAHQKSARHRPPSTALQAHSPALPAPHAHAPALAAAAAAAAAAAAHHLPAMVL

SEQ ID NO: 250 - DNA, 3017 bp, Homo sapiens
acttaggctaggtcgaggctgggtgtgaatcggccgagggttggcagaagggtcccgggcccagagccagcggggccgtgctgagacggcgtcgtgccctgcgtagtgcgtgcggcggcgcgtgcgctaggggagtgggcggtgatggcctggtccacgtgcgtcccttcccgggacccccgcagcttggcgcccagcggctacgtgagccaaggcacccggatgtcctgcgcccctctccgagtgacaagtcccggcctccggtcccgcagtgcccgcagcctcggccggcgtccacgcattgccatggtgactgtgggcaactactgcgaggccgaagggcccgtgggtccggcctggatgcaggatggcctgagtccctgcttcttcttcacgctcgtgccctcgacgcggatggctctagggactctggccttggtgctggctcttccctgcagacgccgggagcggcccgctggtgctgattcgctgtcttggggggccggccctcgcatctctccctacgtgctgcagctgcttctggccacacttcaggcggcgctgcccctggccggcctggctggccgggtgggcactgcccggggggccccactgccaagctatctacttctggcctccgtgctggagagtctggccggcgcctgtggcctgtggctgcttgtcgtggagcggagccaggcacggcagcgtctggcaatgggcatctggatcaagttcaggcacagccctggtctcctgctcctctggactgtggcgtttgcagctgagaacttggccctggtgtcttggaacagcccacagtggtggtgggcaagggcagacttgggccagcaggttcagtttagcctgtgggtgctgcggtatgtggtctctggagggctgtttgtcctgggtctctgggcccctggacttcgtccccagtcctatacattgcaggttcatgaagaggaccaagatgtggaaaggagccaggttcggtcagcagcccaacagtctacctggcgagattttggcaggaagctccgcctcctgagtggctacctgtggcctcgagggagtccagctctgcagctggtggtgctcatctgcctggggctcatgggtttggaacgggcactcaatgtgttggtgcctatattctataggaacattgtgaacttgctgactgagaaggcaccttggaactctctggcctggactgttaccagttacgtcttcctcaagttcctccaggggggtggcactggcagtacaggcttcgtgagcaacctgcgcaccttcctgtggatccgggtgcagcagttcacgtctcggcgggtggagctgctcatcttctcccacctgcacgagctctcactgcgctggcacctggggcgccgcacaggggaggtgctgcggatcgcggatcggggcacatccagtgtcacagggctgctcagctacctggtgttcaatgtcatccccacgctggccgacatcatcattggcatcatctacttcagcatgttcttcaacgcctggtttggcctcattgtgttcctgtgcatgagtctttacctcaccctgaccattgtggtcactgagtggagaaccaagtttcgtcgtgctatgaacacacaggagaacgctacccgggcacgagcagtggactctctgctaaacttcgagacggtgaagtattacaacgccgagagttacgaagtggaacgctatcgagaggccatcatcaaatatcagggtttggagtggaagtcgagcgcttcactggttttactaaatcagacccagaacctggtgattgggctcgggctcctcgccggctccctgctttgcgcatactttgtcactgagcagaagctacaggttggggactatgtgctctttggcacctacattatccagctgtacatgcccctcaattggtttggcacctactacaggatgatccagaccaacttcattgacatggagaacatgtttgacttgctgaaagaggagacagaagtgaaggaccttcctggagcagggccccttcgctttcagaagggccgtattgagtttgagaacgtgcacttcagctatgccgatgggcgggagactctgcaggacgtgtctttcactgtgatgcctggacagacacttgccctggtgggcccatctggggcagggaagagcacaattttgcgcctgctgtttcgcttctacgacatcagctctggctgcatccgaatagatgggcaggacatttcacaggtgacccaggcctctctccggtctcacattggagttgtgccccaagacactgtcctctttaatgacaccatcgccgacaatatccgttacggccgtgtcacagctgggaatgatgaggtggaggctgctgctcaggctgcaggcatccatgatgccattatggctttccctgaagggtacaggacacaggtgggcgagcggggactgaagctgagcggcggggagaagcagcgcgtcgccattgcccgcaccatcctcaaggctccgggcatcattctgctggatgaggcaacgtcagcgctggatacatctaatgagagggccatccaggcttctctggccaaagtctgtgccaaccgcaccaccatcgtagtggcacacaggctctcaactgtggtcaatgctgaccagatcctcgtcatcaaggatggctgcatcgtggagaggggacgacacgaggctctgttgtcccgaggtggggtgtatgctgacatgtggcagctgcagcagggacaggaagaaacctctgaagacactaagcctcagaccatggaacggtgacaaaagtttggccacttccctctcaaagactaacccagaagggaataagatgtgtctcctttccctggcttatttcatcctggtcttggggtatggtgctagctatggtaagggaaagggacctttccgaaaaacatcttttggggaaataaaaattggactgtgaaaaaaaaaaaaaaaaa

SEQ ID NO: 251 - protein, 896 aa, Homo sapiens [sequence omitted]

SEQ ID NO: 252 - DNA, 2993 bp, Homo sapiens
gggcctgcagttggcagaagggtcccgggcccagagccagcggggccgtgctgagacggcgtacgtgccctgcgtgagtgcgtggcggcggcgcgtgcgctaggggagtgggcggtgaggcctggtccacgtgcgtcccttcccgggacccccgcagcttggcgcccagcggctacgtgagccaaggcacccggatgtccgcgcccctctccgagtgacaagtcccggcctccggtcccgcagtgcccgcagcctcggccggcgtccacgcattgccatggtgactgtgggcaactactgcgaggccgaagggcccgtgggtccggcctggatgcaggatggcctgagtccctgcttcttcttcacgctcgtgccctcgacgcggatggctctagggactctggccttggtgctggctcttccctgcagacgccgggagcggcccgctggtgctgattcgctgtcttggggggccggccctcgcatctctccctacgtgctgcagctgcttctggccacacttcaggcggcgctgcccctggccggcctggctggccgggtgggcactgcccggggggccccactgccaagctatctacttctggcctccgtgctggagagtctggccggcgcctgtggcctgtggctgcttgtcgtggagcggagccaggcacggcagcgtctggcaatgggcatctggatcaagttcaggcacagccctggtctcctgctcctctggactgtggcgtttgcagctgagaacttggccctggtgtcttggaacagcccacagtggtggtgggcaagggcagacttgggccaacaggttcagtttagcctgtgggtgctgcggtatgtggtctctggagggctgtttgtcctgggtctctgggcccctggacttcgtccccagtcctatacattgcaggttcatgaagaggaccaagatgtggaaaggagccaggttcggtcagcagcccaacagtctacctggcgagattttggcaggaagctccgcctcctgagtggctacctgtggcctcgagggagtccagctctgcagctggtggtgctcatctgcctggggctcatgggtttggaacgggcactcaatgtgttggtgcctatattctataggaacattgtgaacttgctgactgagaaggcaccttggaactctctggcctggactgttaccagttacgtcttcctcaagttcctccaggggggtggcactggcagtacaggcttcgtgagcaacctgcgcaccttcctgtggatccgggtgcagcagttcacgtctcggcgggtggagctgctcatcttctcccacctgcacgagctctcactgcgctggcacctggggcgccgcacaggggaggtgctgcggatcgcggatcggggcacatccagtgtcacagggctgctcagctacctggtgttcaatgtcatccccacgctggccgacatcatcattggcatcatctacttcagcatgttcttcaacgcctggtttggcctcattgtgttcctgtgcatgagtctttacctcaccctgaccattgtggtcactgagtggagaaccaagtttcgtcgtgctatgaacacacaggagaacgctacccgggcacgagcagtggactctctgctaaacttcgagacggtgaagtattacaacgccgagagttacgaagtggaacgctatcgagaggccatcatcaaatatcagggtttggagtggaagtcgagcgcttcactggttttactaaatcagacccagaacctggtgattgggctcgggctcctcgccggctccctgctttgcgcatactttgtcactgagcagaagctacaggttggggactatgtgctctttggcacctacattatccagctgtacatgcccctcaattggtttggcacctactacaggatgatccagaccaacttcattgacatggagaacatgtttgacttgctgaaagaggagacagaagtgaaggaccttcctggagcagggccccttcgctttcagaagggccgtattgagtttgagaacgtgcacttcagctatgccgatgggcgggagactctgcaggacgtgtctttcactgtgatgcctggacagacacttgccctggtgggcccatctggggcagggaagagcacaattttgcgcctgctgtttcgcttctacgacatcagctctggctgcatccgaatagatgggcaggacatttcacaggtgacccaggcctctctccggtctcacattggagttgtgccccaagacactgtcctctttaatgacaccatcgccgacaatatccgttacggccgtgtcacagctgggaatgatgaggtggaggctgctgctcaggctgcaggcatccatgatgccattatggctttccctgaagggtacaggacacaggtgggcgagcggggactgaagctgagcggcggggagaagcagcgcgtcgccattgcccgcaccatcctcaaggctccgggcatcattctgctggatgaggcaacgtcagcgctggatacatctaatgagagggccatccaggcttctctggccaaagtctgtgccaaccgcaccaccatcgtagtggcacacaggctctcaactgtggtcaatgctgaccagatcctcgtcatcaaggatggctgcatcgtggagaggggacgacacgaggctctgttgtcccgaggtggggtgtatgctgacatgtggcagctgcagcagggacaggaagaaacctctgaagacactaagcctcagaccatggaacggtgacaaaagtttggccacttccctctcaaagactaacccagaagggaataagatgtgtctcctttccctggcttatttcatcctggtcttggggtatggtgctagctatggtaagggaaagggacctttccgaaaaacatcttttggggaaataaaaatgtggactgtgaaaaaaaaaaaaaaaaaaaaa

SEQ ID NO: 253 - protein, 842 aa, Homo sapiens
MVTVGNYCEAEGPVGPAWMQDGLSPCFFFTLVPSTRMALGTLALVLALPCRRRERPAGADSLSWGAGPRISPYVLQLLLATLQAALPLAGLAGRVGTARGAPLPSYLLLASVLESLAGACGLWLLVVERSQARQRLAMGIWIKFRHSPGLLLLWTVAFAAENLALVSWNSPQWWWARADLGQQVQFSLWVLRYVVSGGLFVLGLWAPGLRPQSYTLQVHEEDQDVERSQVRSAAQQSTWRDFGRKLRLLSGYLWPRGSPALQLVVLICLGLMGLERALNVLVPIFYRNIVNLLTEKAPWNSLAWTVTSYVFLKFLQGGGTGSTGFVSNLRTFLWIRVQQFTSRRVELLIFSHLHELSLRWHLGRRTGEVLRIADRGTSSVTGLLSYLVFNVIPTLADIIIGIIYFSMFFNAWFGLIVFLCMSLYLTLTIVVTEWRTKFRRAMNTQENATRARAVDSLLNFETVKYYNAESYEVERYREAIIKYQGLEWKSSASLVLLNQTQNLVIGLGLLAGSLLCAYFVTEQKLQVGDYVLFGTYIIQLYMPLNWFGTYYRMIQTNFIDMENMFDLLKEETEVKDLPGAGPLRFQKGRIEFENVHFSYADGRETLQDVSFTVMPGQTLALVGPSGAGKSTILRLLFRFYDISSGCIRIDGQDISQVTQASLRSHIGVVPQDTVLFNDTIADNIRYGRVTAGNDEVEAAAQAAGIHDAIMAFPEGYRTQVGERGLKLSGGEKQRVAIARTILKAPGIILLDEATSALDTSNERAIQASLAKVCANRTTIVVAHRLSTVVNADQILVIKDGCIVERGRHEALLSRGGVYADMWQLQQGQEETSEDTKPQTMER

SEQ ID NO: 254 - DNA, 5942 bp, Homo sapiens
aaaaggcggcaaggagccgagaggctgcttcggagtgtgaggaggacagccggaccgagccaacgccggggactttgttccctccgcggaggggactcggcaactcgcagcggcagggtctggggccggcgcctgggagggatctgcgccccccactcactccctagctgtgttcccgccgccgccccggctagtctccggcgctggcgcctatggtcggcctccgacagcgctccggagggaccgggggagctcccaggcgcccgggactggagactgatgcatgagggggctacggaggcgcaggagcggtggtgatggtctgggaagcggagctgaagtgccctgggctttggtgaggcgtgacagtttatcatgaccgtgttcaggcaggaaaacgtggatgattactacgacaccggcgaggaacttggcagtggacagtttgcggttgtgaagaaatgccgtgagaaaagcaccggcctccagtatgccgccaaattcatcaagaaaaggaggactaagtccagccggcggggtgtgagccgcgaggacatcgagcgggaggtcagcatcctgaaggagatccagcaccccaatgtcatcaccctgcacgaggtctatgagaacaagacggacgtcatcctgatcttggaactcgttgcaggtggcgagctgtttgacttcttagctgaaaaggaatctttaactgaagaggaagcaactgaatttctcaaacaaattcttaatggtgtttactacctgcactcccttcaaatcgcccactttgatcttaagcctgagaacataatgcttttggatagaaatgtccccaaacctcggatcaagatcattgactttgggttggcccataaaattgactttggaaatgaatttaaaaacatatttgggactccagagtttgtcgctcctgagatagtcaactatgaacctcttggtcttgaggcagatatgtggagtatcggggtaataacctatatcctcctaagtggggcctccccatttcttggagacactaagcaagaaacgttagcaaatgtatccgctgtcaactacgaatttgaggatgaatacttcagtaataccagtgccctagccaaagatttcataagaagacttctggtcaaggatccaaagaagagaatgacaattcaagatagtttgcagcatccctggatcaagcctaaagatacacaacaggcacttagtagaaaagcatcagcagtaaacatggagaaattcaagaagtttgcagcccggaaaaaatggaaacaatccgttcgcttgatatcactgtgccaaagattatccaggtcattcctgtccagaagtaacatgagtgttgccagaagcgatgatactctggatgaggaagactcctttgtgatgaaagccatcatccatgccatcaacgatgacaatgtcccaggcctgcagcaccttctgggctcattatccaactatgatgttaaccaacccaacaagcacgggacacctccattactcattgctgctggctgtgggaatattcaaatactacagttgctcattaaaagaggctcgagaatcgatgtccaggataagggcgggtccaatgccgtctactgggctgctcggcatggccacgtcgataccttgaaatttctcagtgagaacaaatgccctttggatgtgaaagacaagtctggagagatggccctccacgtggcagctcgctatggccatgctgacgtggctcagttactgtgcagcttcggctcaaatcccaatatccaggacaaggaagaagaaacccccctgcactgtgctgcttggcacggctattactctgtggccaaagccctttgtgaagccggctgtaacgtgaacatcaagaaccgagaaggagagacgcccctcctgacagcctctgccaggggctaccacgacatcgtggagtgtctggccgaacatggagccgaccttaatgcttgcgacaaggacggacacattgcccttcatctggctgtaagacggtgtcagatggaggtaatcaagactctcctcagccaagggtgtttcgtcgattatcaagacaggcacggcaatactcccctccatgtggcatgtaaagatggcaacatgcctatcgtggtggccctctgtgaagcaaactgcaatttggacatctccaacaagtatgggcgaacgcctctgcaccttgcggccaacaacggaatcctagacgtggtccggtatctctgtctgatgggagccagcgttgaggcgctgaccacggacggaaagacggcagaagatcttgctagatcggaacagcacgagcacgtagcaggtctccttgcaagacttcgaaaggatacgcaccgaggactcttcatccagcagctccgacccacacagaacctgcagccaagaattaagctcaagctgtttggccactcgggatccgggaaaaccacccttgtagaatctctcaagtgtgggctgctgaggagctttttcagaaggcgtcggcccagactgtcttccaccaactccagcaggttcccaccttcacccctggcttctaagcccacagtctcagtgagcatcaacaacctgtacccaggctgcgagaacgtgagtgtgaggagccgcagcatgatgttcgagccgggtcttaccaaagggatgctggaggtgtttgtggccccgacccaccacccgcactgctcggccgatgaccagtccaccaaggccatcgacatccagaacgcttatttgaatggagttggcgatttcagcgtgtgggagttctctggaaatcctgtgtatttctgctgttatgactattttgctgcaaatgatcccacgtcaatccatgttgttgtctttagtctagaagagccctatgagatccagctgaaccaagtgattttctggctcagtttcctgaagtcccttgtcccagttgaagaacccatagccttcggtggcaagctgaagaacccactccaagttgtcctggtggccacccacgctgacatcatgaatgttcctcgaccggctggaggcgagtttggatatgacaaagacacatcgttgctgaaagagattaggaacaggtttggaaatgatcttcacatttcaaataagctgtttgttctggatgctggggcttctgggtcaaaggacatgaaggtacttcgaaatcatctgcaagaaatacgaagccagattgtttcggtctgtcctcccatgactcacctgtgtgagaaaatcatctccacgctgccttcctggaggaagctcaatggacccaaccagctgatgtcgctgcagcagtttgtgtacgacgtgcaggaccagctgaaccccctggccagcgaggaggacctcaggcgcattgctcagcagctccacagcacaggcgagatcaacatcatgcaaagtgaaacagttcaggacgtgctgctcctggacccccgctggctctgcacaaacgtcctggggaagttgctgtccgtggagaccccacgggcgctgcaccactaccggggccgctacaccgtggaggacatccagcgcctggtgcccgacagcgacgtggaggagctgctgcagatcctcgatgccatggacatctgcgcccgggacctgagcagcgggaccatggtggacgtcccagccctgatcaagacagacaacctgcaccgctcctgggctgatgaggaggacgaggtgatggtgtatggtggcgtgcgcatcgtgcccgtggaacacctcacccccttcccatgtggcatctttcacaaggtccaggtgaacctgtgccggtggatccaccagcaaagcacagagggcgacgcggacatccgcctgtgggtgaatggctgcaagctggccaaccgtggggccgagctgctggtgctgctggtcaaccacggccagggcattgaggtccaggtccgcggcctggagacggagaagatcaagtgctgcctgctgctggactcggtgtgcagcaccattgagaacgtcatggccaccacgctgccagggctcctgaccgtgaagcattacctgagcccccagcagctgcgggagcaccatgagcccgtcatgatctaccagccacgggacttcttccgggcacagactctgaaggaaacctcactgaccaacaccatgggggggtacaaggaaagcttcagcagcatcatgtgcttcgggtgtcacgacgtctactcacaggccagcctcggcatggacatccatgcatcagacctgaacctcctcactcggaggaaactgagtcgcctgctggacccgcccgaccccctggggaaggactggtgccttctcgccatgaacttaggcctccctgacctcgtggcaaagtacaacaccagtaacggggctcccaaggatttcctccccagccccctccacgccctgctgcgggaatggaccacctaccctgagagcacagtgggcaccctcatgtccaaactgagggagctgggtcgccgggatgccgcagactttttgctgaaggcatcctctgtgttcaaaatcaacctggatggcaatggccaggaggcctatgcctcgagctgcaacagcggcacctcttacaattccattagctctgttgtatcccggtgagggcagcctctggcttgggcagggtctgtttggactgcagaagcaagggggtgatgtagcccatccttccctttggagatgctgagggtgtttcttcctgcacccacagccagggggatgccactcctccctccggcttgacctgtttctctgccgctacctccctccccgtctcattccgttgtctgtggatggtcattgcagtttaagagcagaacagatcttttactttggccgcttgaaaagctagtgtacctcctctcagtgttttggactccatctctcatcctccagtaccttgcttcttactgataattttgctggaattcctaacttttcaatgacattttttttaactactatattgattgtcctttaaaaaagaaaagtgcatatttatccaaaatgtgtatttcttatacgcttttctttgttataccatttcctcagcttatctcttttatatttgtaggagaaactcccatgtatggaatcccactgtatgatttataaacagacaatatgtgagtgccttttgcagaagagggtgtgtttgaaatcatcggagtcagccaggagctgtcaccaaggaaacgctacctctctgtcccttgctgtatgctgatcatcgccagaggtgcttcaccctgagttttgttttgtattgttttctgacagtttttctgttttgtttggcaaggaaaggggagaagggaatcctcctccagggtgattttatgatcagtgttgttgctctaggaagacatttttccgtttgcttttgttccaatgtcaatgtgaacgtccacatgaaacctacacactgtcatgcttcatcattccctctcatctcaggtagaaggttgacacagttgtagggttacagagacctatgtaagaattcagaagacccctgactcatcatttgtggcagtcccttataattggtgcatagcagatggtttccacatttagatcctggtttcataacttcctgtacttgaagtctaaaagcagaaaataaaggaagcaagttttcttccatgattttaaattgtgatcgagttttaaattgataggagggaacatgtcctaattcttctgtcctgagaagcatgtaatgttaatgttatatcatatgtatatatatatatgcactatgtatatacatatatattaatactggtatttttacttaatctataaaatgtcgttaaaaagttgtttgtttttttctttttttataaataaactgttgctcgttgcattaaaaa

SEQ ID NO: 255 - protein, 1430 aa, Homo sapiens
MTVFRQENVDDYYDTGEELGSGQFAVVKKCREKSTGLQYAAKFIKKRRTKSSRRGVSREDIEREVSILKEIQHPNVITLHEVYENKTDVILILELVAGGELFDFLAEKESLTEEEATEFLKQILNGVYYLHSLQIAHFDLKPENIMLLDRNVPKPRIKIIDFGLAHKIDFGNEFKNIFGTPEFVAPEIVNYEPLGLEADMWSIGVITYILLSGASPFLGDTKQETLANVSAVNYEFEDEYFSNTSALAKDFIRRLLVKDPKKRMTIQDSLQHPWIKPKDTQQALSRKASAVNMEKFKKFAARKKWKQSVRLISLCQRLSRSFLSRSNMSVARSDDTLDEEDSFVMKAIIHAINDDNVPGLQHLLGSLSNYDVNQPNKHGTPPLLIAAGCGNIQILQLLIKRGSRIDVQDKGGSNAVYWAARHGHVDTLKFLSENKCPLDVKDKSGEMALHVAARYGHADVAQLLCSFGSNPNIQDKEEETPLHCAAWHGYYSVAKALCEAGCNVNIKNREGETPLLTASARGYHDIVECLAEHGADLNACDKDGHIALHLAVRRCQMEVIKTLLSQGCFVDYQDRHGNTPLHVACKDGNMPIVVALCEANCNLDISNKYGRTPLHLAANNGILDVVRYLCLMGASVEALTTDGKTAEDLARSEQHEHVAGLLARLRKDTHRGLFIQQLRPTQNLQPRIKLKLFGHSGSGKTTLVESLKCGLLRSFFRRRRPRLSSTNSSRFPPSPLASKPTVSVSINNLYPGCENVSVRSRSMMFEPGLTKGMLEVFVAPTHHPHCSADDQSTKAIDIQNAYLNGVGDFSVWEFSGNPVYFCCYDYFAANDPTSIHVVVFSLEEPYEIQLNQVIFWLSFLKSLVPVEEPIAFGGKLKNPLQVVLVATHADIMNVPRPAGGEFGYDKDTSLLKEIRNRFGNDLHISNKLFVLDAGASGSKDMKVLRNHLQEIRSQIVSVCPPMTHLCEKIISTLPSWRKLNGPNQLMSLQQFVYDVQDQLNPLASEEDLRRIAQQLHSTGEINIMQSETVQDVLLLDPRWLCTNVLGKLLSVETPRALHHYRGRYTVEDIQRLVPDSDVEELLQILDAMDICARDLSSGTMVDVPALIKTDNLHRSWADEEDEVMVYGGVRIVPVEHLTPFPCGIFHKVQVNLCRWIHQQSTEGDADIRLWVNGCKLANRGAELLVLLVNHGQGIEVQVRGLETEKIKCCLLLDSVCSTIENVMATTLPGLLTVKHYLSPQQLREHHEPVMIYQPRDFFRAQTLKETSLTNTMGGYKESFSSIMCFGCHDVYSQASLGMDIHASDLNLLTRRKLSRLLDPPDPLGKDWCLLAMNLGLPDLVAKYNTSNGAPKDFLPSPLHALLREWTTYPESTVGTLMSKLRELGRRDAADFLLKASSVFKINLDGNGQEAYASSCNSGTSYNSISSVVSR

SEQ ID NO: 256 - DNA, 1945 bp, Homo sapiens
acttttggtcgagcggagggcgcgcagctccaccgttgccaagacgccgcgtaaacacccgagcgcgcgcagccaggtgcgctccttggggctgctggctgctgcgtttgcggcgggaggtggtggccgcggtcccacgagaaggggtatttttcgtcagccaagatgggttccaaaaggagaaatttgagctgtagtgaaaggcatcagaaattagtagatgaaaactactgcaaaaaattacatgtccaagctctaaaaaacgtcaacagtcaaatcaggaatcaaatggtgcagaatgaaaatgataaccgtgttcagcgcaagcaatttctcagattattacaaaatgaacaatttgagttggatatggaagaggccattcaaaaggcagaagaaaacaagagattgaaagaactccagctcaaacaagaagaaaaactggctatggaattggcaaaactgaaacatgaaagtctaaaggacgaaaagatgaggcaacaagtaagagaaaacagcattgagcttagagaattggagaagaaattaaaagcagcttacatgaataaagaaagggcagctcagattgctgaaaaggatgccattaaatatgaacaaatgaaacgtgatgctgaaatagccaaaaccatgatggaagaacacaagagaataataaaggaagagaatgctgcagaagacaaacgaaacaaagcgaaagcacagtactatcttgacttagagaaacaacttgaagaacaagaaaaaaaaaagcaggaagcttatgagcagctgctaaaagagaaactcatgattgatgaaattgttaggaagatctatgaagaagatcagttggaaaaacaacaaaagttagaaaaaatgaatgcaatgcgaaggtatatagaagagtttcagaaagagcaggctctctggagaaaaaagaaacgtgaggagatggaagaagaaaacagaaaaatcatagagtttgctaacatgcagcagcaaagagaagaagatcggatggcaaaagttcaagaaaatgaggagaaaaggctacagcttcagaatgcgttgacacagaaattagaagaaatgctgcggcaacgtgaagatttggaacaagtgcgacaagaattataccaggaagaacaagctgaaatatataagagcaagctaaaagaagaagcagaaaagaaattgagaaagcaaaaagagatgaagcaagattttgaagaacaaatggccttgaaggaattagtgctacaggctgcaaaagaggaagaggagaactttagaaaaactatgctagctaaatttgctgaggatgatcgaatagaattaatgaatgctcagaaacaaagaatgaagcagctggaacacaggagggctgtggaaaaacttattgaagagcgtcgccaacaattccttgcagacaaacaacgtgaactagaagagtggcagttgcagcaaaggcggcaaggatttattaatgcaattattgaagaagaaaggctaaaacttcttaaagagcatgctacaaacttactaggctatctccctaaaggagtatttaaaaaagaggatgatattgatctgcttggtgaagagttcaggaaagtatatcaacaaaggagtgaaatttgtgaagagaaatgatatcatcaaaattgggtaaagcatagattttttgtatgttaccactagatgtcagcataacttttgttttacagctcagtggcattaggtatccattgtctgtttggattttgtaaatcatcactgaatttcataacttgtaaacaattatcagatacaaattaattttaatcaagctgttatttttgtactgataatttcaaaatccgatttctacaacactacagagcactgtttgcatccccatcctcaagacagtatatttaccttgactaatacagaactctacccc

SEQ ID NO: 257 - protein, 495 aa, Homo sapiens
MGSKRRNLSCSERHQKLVDENYCKKLHVQALKNVNSQIRNQMVQNENDNRVQRKQFLRLLQNEQFELDMEEAIQKAEENKRLKELQLKQEEKLAMELAKLKHESLKDEKMRQQVRENSIELRELEKKLKAAYMNKERAAQIAEKDAIKYEQMKRDAEIAKTMMEEHKRIIKEENAAEDKRNKAKAQYYLDLEKQLEEQEKKKQEAYEQLLKEKLMIDEIVRKIYEEDQLEKQQKLEKMNAMRRYIEEFQKEQALWRKKKREEMEEENRKIIEFANMQQQREEDRMAKVQENEEKRLQLQNALTQKLEEMLRQREDLEQVRQELYQEEQAEIYKSKLKEEAEKKLRKQKEMKQDFEEQMALKELVLQAAKEEEENFRKTMLAKFAEDDRIELMNAQKQRMKQLEHRRAVEKLIEERRQQFLADKQRELEEWQLQQRRQGFINAIIEEERLKLLKEHATNLLGYLPKGVFKKEDDIDLLGEEFRKVYQQRSEICEEK

SEQ ID NO: 258 - DNA, 3182 bp, Homo sapiens
gggtgggacttcctgcttcgcgtgccgctgggccaagggacagagcccgctcctccaggctggtggggcggtgcgatgaggcggcttctgggccatacgtcagcacgtggggtggcgccgcacccctgaggatcccggtccacgcggaggagtggggcttttcaccgccgccgccgccgccctcggacctctcccgggatacttcacatttccctagggacgggagcccgaggggtccgttcggccctcttcctctcgctgggccgacaccccgctgtaggaccgtaacccttagtcccaatgcctccgtaagcggagttgagtgggtgcctgtggttggagctgtggaggtgtccccggtggcgagcgcggccagaactgcggtcacttaagttttccgtgtgcgggttgcaaggagcgtgcgtgcgtctggtataatttggcttcctgagattctgccttagcaagaaaggagtgggaaatacccttggaaagaaaactaaaacagtaagaaagccaaaacttatttttacatggttgtcagcacatttaccgatatggacacttttcccaataattttcctcctggtggagacagtggattgacaggttctcagtcggagttccagaaaatgttaattgatgaaaggttacgatgtgagcatcataaagctaattatcagacactgaaggctgaacacacaaggttgcagaatgaacatgtaaagttacaaaatgaactcaagcacctgtttaatgaaaagcaaactcagcaggaaaaacttcagctcctgcttgaagaactaagaggagaattagtagagaaaactaaagatttagaagaaatgaaactgcagatattaactccacaaaaattggaattgctaagagcccaaatacaacaagaattagaaactccaatgagagaacgttttaggaatctagatgaagaggtagaaaagtatagagctgtatataataagcttcgctatgaacatacatttctcaagtcagaatttgaacaccagaaggaagagtatgcacgtattttagatgaaggaaaaataaaatatgaatcagagattgcaagactggaggaagataaagaagaactacgtaaccagctgcttaatgttgatctcacaaaagacagcaaacgagtggaacaacttgctcgagaaaaagtctatttgtgtcaaaaattaaaaggtttagaggctgaagtagcggaattaaaggctgaaaaggagaattctgaggctcaggtggaaaatgcccaaagaatacaggtgcggcagttggctgagatgcaggctacagtcagatccctggaggctgaaaaacaatcagctaatttacgggcagaacgtttggaaaaagagctacaatcaagcagtgaacaaaatacctttttaattaataaattgcataaagctgaacgagaaataaatacattgtccagtaaagtaaaagaacttaaacattcaaacaaactggaaataacagacatcaaactggagacagcaagagctaagagtgagctagaaagagaaaggaataagattcaaagtgaactggatggattacagtcagacaatgaaattctcaaagcagctgttgaacatcacaaagtgctcttagtagaaaaggatcgtgaattaatacgtaaagtacaagctgccaaagaagaaggttatcaaaaacttgtggtattacaagatgaaaagttagaactcgagaacagattagcagatttggagaaaatgaaagtggaacatgatgtctggaggcaatctgaaaaggatcagtatgaagagaaattgcgggcttcacagatggcagaagagatcaccaggaaggagcttcagagtgttaggttaaaacttcagcaacaaattgtgactattgaaaatgcagagaaggaaaaaaatgaaaattctgacctaaaacagcaaatcagtagtttgcagatccaagtgacttcacttgcacagtcagagaatgacttgctgaattcaaaccaaatgctgaaggaaatggtggagagattaaaacaagaatgccgaaattttagaagccaagctgaaaaagcgcaactagaagctgaaaagacattggaagagaaacagatacagtggttggaagaaaagcataagcttcatgagcgtatcacagacagagaagaaaagtacaatcaagctaaggagaaactgcagcgagctgcaattgcccagaaaaagagaaaatctcttcatgaaaacaaattgaaaagactacaagagaaagtagaagtcttggaggcaaagaaagaagaattggaaacagaaaatcaggtcttaaatagacaaaatgttccttttgaagactatacaaggcttcaaaaaagactaaaagatatacagagaagacataatgaatttcgaagtctaattttggttcctaacatgcctccaacagcatctatcaatcctgttagctttcagtcatcagccatggttccaagcatggaactaccatttcctcctcatatgcaggaggaacaacatcaaagggaactctctctacttcgcaaaagactagaagaactggaaacaacacaaagaaaacaactagaggaacttggatcttccggagaatgatgttcttggagaacaggcagatcaaaagaggtgaagttggtgactcagtaaaacttgacattttaacctgtggcatttagatactttttactgtttgccaaaacacttgaatgtgcctcaagaaaaggtacctactacatgctgtattgtatgactgtcaggattttaagattatacaagtgaagcattaaaagagaaattctcagagatatttagaatatttgacaatggtttgagaatgtaaaacaaaaaggaactagttagagtcaagttttaaaatttttactttgttgaatttttttttttggcattttgagtgaaatataactatcattaattctctcttcatctttgagatgcttggccataacagggtccatacacatcttctggtttactatatacaaaaactgtagttgaaaaaagatgacaatttaaaagtcagcctaaagaatgtaaaggtatctatatacaaaaggctaccttttctaaaatctgtgtgcacataattaaagagcttaatttttttttaaaaaaaaaaaa

SEQ ID NO: 259 - protein, 701 aa, Homo sapiens
MVVSTFTDMDTFPNNFPPGGDSGLTGSQSEFQKMLIDERLRCEHHKANYQTLKAEHTRLQNEHVKLQNELKHLFNEKQTQQEKLQLLLEELRGELVEKTKDLEEMKLQILTPQKLELLRAQIQQELETPMRERFRNLDEEVEKYRAVYNKLRYEHTFLKSEFEHQKEEYARILDEGKIKYESEIARLEEDKEELRNQLLNVDLTKDSKRVEQLAREKVYLCQKLKGLEAEVAELKAEKENSEAQVENAQRIQVRQLAEMQATVRSLEAEKQSANLRAERLEKELQSSSEQNTFLINKLHKAEREINTLSSKVKELKHSNKLEITDIKLETARAKSELERERNKIQSELDGLQSDNEILKAAVEHHKVLLVEKDRELIRKVQAAKEEGYQKLVVLQDEKLELENRLADLEKMKVEHDVWRQSEKDQYEEKLRASQMAEEITRKELQSVRLKLQQQIVTIENAEKEKNENSDLKQQISSLQIQVTSLAQSENDLLNSNQMLKEMVERLKQECRNFRSQAEKAQLEAEKTLEEKQIQWLEEKHKLHERITDREEKYNQAKEKLQRAAIAQKKRKSLHENKLKRLQEKVEVLEAKKEELETENQVLNRQNVPFEDYTRLQKRLKDIQRRHNEFRSLILVPNMPPTASINPVSFQSSAMVPSMELPFPPHMQEEQHQRELSLLRKRLEELETTQRKQLEELGSSGE

SEQ ID NO: 260 - DNA, 3235 bp, Homo sapiens
gggtgggacttcctgcttcgcgtgccgctgggccaagggacagagcccgctcctccaggctggtggggcggtgcgatgaggcggcttctgggccatacgtcagcacgtggggtggcgccgcacccctgaggatcccggtccacgcggaggagtggggcttttcaccgccgccgccgccgccctcggacctctcccgggatacttcacatttccctagggacgggagcccgaggggtccgttcggccctcttcctctcgctgggccgacaccccgctgtaggaccgtaacccttagtcccaatgcctccgtaagcggagttgagtgggtgcctgtggttggagctgtggaggtgtccccggtggcgagcgcggccagaactgcggtcacttaagttttccgtgtgcgggttgcaaggagcgtgcgtgcgtctggtatagggaggacacctctggattgaggatcttatgacctactttagaggaaggtataatttggcttcctgagattctgccttagcaagaaaggagtgggaaatacccttggaaagaaaactaaaacagtaagaaagccaaaacttatttttacatggttgtcagcacatttaccgatatggacacttttcccaataattttcctcctggtggagacagtggattgacaggttctcagtcggagttccagaaaatgttaattgatgaaaggttacgatgtgagcatcataaagctaattatcagacactgaaggctgaacacacaaggttgcagaatgaacatgtaaagttacaaaatgaactcaagcacctgtttaatgaaaagcaaactcagcaggaaaaacttcagctcctgcttgaagaactaagaggagaattagtagagaaaactaaagatttagaagaaatgaaactgcagatattaactccacaaaaattggaattgctaagagcccaaatacaacaagaattagaaactccaatgagagaacgttttaggaatctagatgaagaggtagaaaagtatagagctgtatataataagcttcgctatgaacatacatttctcaagtcagaatttgaacaccagaaggaagagtatgcacgtattttagatgaaggaaaaataaaatatgaatcagagattgcaagactggaggaagataaagaagaactacgtaaccagctgcttaatgttgatctcacaaaagacagcaaacgagtggaacaacttgctcgagaaaaagtctatttgtgtcaaaaattaaaaggtttagaggctgaagtagcggaattaaaggctgaaaaggagaattctgaggctcaggtggaaaatgcccaaagaatacaggtgcggcagttggctgagatgcaggctacagtcagatccctggaggctgaaaaacaatcagctaatttacgggcagaacgtttggaaaaagagctacaatcaagcagtgaacaaaatacctttttaattaataaattgcataaagctgaacgagaaataaatacattgtccagtaaagtaaaagaacttaaacattcaaacaaactggaaataacagacatcaaactggagacagcaagagctaagagtgagctagaaagagaaaggaataagattcaaagtgaactggatggattacagtcagacaatgaaattctcaaagcagctgttgaacatcacaaagtgctcttagtagaaaaggatcgtgaattaatacgtaaagtacaagctgccaaagaagaaggttatcaaaaacttgtggtattacaagatgaaaagttagaactcgagaacagattagcagatttggagaaaatgaaagtggaacatgatgtctggaggcaatctgaaaaggatcagtatgaagagaaattgcgggcttcacagatggcagaagagatcaccaggaaggagcttcagagtgttaggttaaaacttcagcaacaaattgtgactattgaaaatgcagagaaggaaaaaaatgaaaattctgacctaaaacagcaaatcagtagtttgcagatccaagtgacttcacttgcacagtcagagaatgacttgctgaattcaaaccaaatgctgaaggaaatggtggagagattaaaacaagaatgccgaaattttagaagccaagctgaaaaagcgcaactagaagctgaaaagacattggaagagaaacagatacagtggttggaagaaaagcataagcttcatgagcgtatcacagacagagaagaaaagtacaatcaagctaaggagaaactgcagcgagctgcaattgcccagaaaaagagaaaatctcttcatgaaaacaaattgaaaagactacaagagaaagtagaagtcttggaggcaaagaaagaagaattggaaacagaaaatcaggtcttaaatagacaaaatgttccttttgaagactatacaaggcttcaaaaaagactaaaagatatacagagaagacataatgaatttcgaagtctaattttggttcctaacatgcctccaacagcatctatcaatcctgttagctttcagtcatcagccatggttccaagcatggaactaccatttcctcctcatatgcaggaggaacaacatcaaagggaactctctctacttcgcaaaagactagaagaactggaaacaacacaaagaaaacaactagaggaacttggatcttccggagaatgatgttcttggagaacaggcagatcaaaagaggtgaagttggtgactcagtaaaacttgacattttaacctgtggcatttagatactttttactgtttgccaaaacacttgaatgtgcctcaagaaaaggtacctactacatgctgtattgtatgactgtcaggattttaagattatacaagtgaagcattaaaagagaaattctcagagatatttagaatatttgacaatggtttgagaatgtaaaacaaaaaggaactagttagagtcaagttttaaaatttttactttgttgaatttttttttttggcattttgagtgaaatataactatcattaattctctcttcatctttgagatgcttggccataacagggtccatacacatcttctggtttactatatacaaaaactgtagttgaaaaaagatgacaatttaaaagtcagcctaaagaatgtaaaggtatctatatacaaaaggctaccttttctaaaatctgtgtgcacataattaaagagcttaatttttttttaaaaaaaaaaaa

SEQ ID NO: 261 - protein, 701 aa, Homo sapiens; identical to SEQ ID NO: 259

SEQ ID NO: 262 - DNA, 2130 bp, Homo sapiens
ggttaaacggggcccaaggcaggggtggcgggtcagtgctgctcgggggcttctccatccaggtccctggagttcctggtccctggagctccgcacttggcggcgcaacctgcgtgaggcagcgcgactctggcgactggccggccatgccttcccgggctgaggactatgaagtgttgtacaccattggcacaggctcctacggccgctgccagaagatccggaggaagagtgatggcaagatattagtttggaaagaacttgactatggctccatgacagaagctgagaaacagatgcttgtttctgaagtgaatttgcttcgtgaactgaaacatccaaacatcgttcgttactatgatcggattattgaccggaccaatacaacactgtacattgtaatggaatattgtgaaggaggggatctggctagtgtaattacaaagggaaccaaggaaaggcaatacttagatgaagagtttgttcttcgagtgatgactcagttgactctggccctgaaggaatgccacagacgaagtgatggtggtcataccgtattgcatcgggatctgaaaccagccaatgttttcctggatggcaagcaaaacgtcaagcttggagactttgggctagctagaatattaaaccatgacacgagttttgcaaaaacatttgttggcacaccttattacatgtctcctgaacaaatgaatcgcatgtcctacaatgagaaatcagatatctggtcattgggctgcttgctgtatgagttatgtgcattaatgcctccatttacagcttttagccagaaagaactcgctgggaaaatcagagaaggcaaattcaggcgaattccataccgttactctgatgaattgaatgaaattattacgaggatgttaaacttaaaggattaccatcgaccttctgttgaagaaattcttgagaaccctttaatagcagatttggttgcagacgagcaaagaagaaatcttgagagaagagggcgacaattaggagagccagaaaaatcgcaggattccagccctgtattgagtgagctgaaactgaaggaaattcagttacaggagcgagagcgagctctcaaagcaagagaagaaagattggagcagaaagaacaggagctttgtgttcgtgagagactagcagaggacaaactggctagagcagaaaatctgttgaagaactacagcttgctaaaggaacggaagttcctgtctctggcaagtaatccagaacttcttaatcttccatcctcagtaattaagaagaaagttcatttcagtggggaaagtaaagagaacatcatgaggagtgagaattctgagagtcagctcacatctaagtccaagtgcaaggacctgaagaaaaggcttcacgctgcccagctgcgggctcaagccctgtcagatattgagaaaaattaccaactgaaaagcagacagatcctgggcatgcgctagccaggtagagagacacagagctgtgtacaggatgtaatattaccaacctttaaagactgatattcaaatgctgtagtgttgaatacttggttccatgagccatgcctttctgtatagtacacatgatatttcggaattggttttactgttcttcagcaactattgtacaaaatgttcacatttaatttttctttcttcttttaagaacatattataaaaagaatactttcttggttgggcttttaatcctgtgtgtgattactagtaggaacatgagatgtgacattctaaatcttgggagaaaaaataatgttaggaaaaaaatatttatgcaggaagagtagcactcactgaatagttttaaatgactgagtggtatgcttacaattgtcatgtctagatttaaattttaagtctgagattttaaatgtttttgagcttagaaaacccagttagatgcaatttggtcattaataccatgacatcttgcttataaatattccattgctctgtagttcaaatctgttagctttgtgaaaattcatcactgtgatgtttgtattctttttttttttctgtttaacagaatatgagctgtctgtcatttacctacttctttcccactaaataaaagaattcttcagtt

SEQ ID NO: 263 - protein, 445 aa, Homo sapiens
MPSRAEDYEVLYTIGTGSYGRCQKIRRKSDGKILVWKELDYGSMTEAEKQMLVSEVNLLRELKHPNIVRYYDRIIDRTNTTLYIVMEYCEGGDLASVITKGTKERQYLDEEFVLRVMTQLTLALKECHRRSDGGHTVLHRDLKPANVFLDGKQNVKLGDFGLARILNHDTSFAKTFVGTPYYMSPEQMNRMSYNEKSDIWSLGCLLYELCALMPPFTAFSQKELAGKIREGKFRRIPYRYSDELNEIITRMLNLKDYHRPSVEEILENPLIADLVADEQRRNLERRGRQLGEPEKSQDSSPVLSELKLKEIQLQERERALKAREERLEQKEQELCVRERLAEDKLARAENLLKNYSLLKERKFLSLASNPELLNLPSSVIKKKVHFSGESKENIMRSENSESQLTSKSKCKDLKKRLHAAQLRAQALSDIEKNYQLKSRQILGMR

SEQ ID NO: 264 - DNA, 3507 bp, Homo sapiens
ccggggccgagccgctgttcggctgacagttgaggatggccggagccgagggcgccgctgggcggcagtcggagctggagcccgtggtatcgttggtcgacgtccttgaggaggacgaggagctggagaatgaggcgtgcgctgtcctgggcggcagcgactccgagaagtgctcctactctcagggctcagtaaagagacaagcactatatgcctgtagtacctgcaccccagagggagaagaaccagcaggaatttgtttagcttgcagttatgaatgtcatggaagtcacaaactatttgagctatacacaaaaagaaattttcgttgtgattgtggaaacagcaagtttaaaaatttggaatgcaaattacttcctgacaaagcaaaggtaaattctggcaataagtacaatgacaacttttttggattgtactgcatttgcaagagaccttatcctgatcctgaagacgagattccagatgagatgatccagtgcgtagtctgtgaagactggttccatggaaggcatcttggtgccattccccctgagagtggggattttcaggagatggtatgccaggcctgcatgaaacgttgttcttttttgtgggcttatgctgcacaattggcagtaaccaaaatatccactgaggatgatggattggtgcggaacattgatggaataggtgatcaggaagttatcaaacctgaaaatggagagcatcaagatagtaccctcaaagaggatgttccagaacagggaaaggatgatgtccgggaggttaaagtagagcagaacagtgaaccatgtgccggctctagttctgaatctgatctccagacagtgtttaagaatgaaagcctcaacgcagaatcaaaatctggctgcaaacttcaggagcttaaagctaagcagcttataaagaaagacactgccacctattggcccctgaactggcgtagcaagttgtgtacctgccaagactgtatgaaaatgtatggagatctagatgtcttattcctgacagatgaatacgacacagttctggcttatgaaaacaaagggaagattgcccaggccactgacaggagcgatcccctaatggatacccttagcagcatgaatagagtccagcaagtggaactcatttgtgaatacaatgatttgaagactgaacttaaagactatctcaagagatttgctgatgaaggcacggttgttaagagagaggacattcagcagttctttgaagagtttcagtcaaaaaagagaagaagagtggatgggatgcagtattactgcagctagagtggagtatgaagctttctcattcaagccaatgaaaatgtgcttcccattcttggaataaaagaggtgtggttcacatttggccccctttccgtcctcctctgtttggagaggcctcgcgctcccttcattctctttagctgcagtagccaccgtgtggatgctgacttcacagccagcgtcctctgtgactcagctgatgcagctcattccacagacttcgccagtgtactcctactccagtgcacccagggttatttgcatagtttttaagtttgattttgttttgagaaagcaaattggtgtcttgtttaatgatctgttatttcactcccagatgtgtgtgttttgccacagagctgttgccttccagaacctcctccgcaggcatcacggaaggctctcttcccgtcacctagaacctctacaggtcccctcgcccctatgattgtggtgccttgggtcaaagcttcctcaagcctggtctgctccttctttcacgtccctgttttctgaggtttggtcatagcttagaaaggatcttggggcttgttttctctaggcccaacctccagagtagccaggactgatggttttctggtctggatgtctgtcacaggcggagagattaacagatgacagggttgaggaagcaagcctttgttatgaattttactaatacagttcaagtgaaattttcgttcatgattctattggcactagaattagaatttcagtactgtagtgctcacagggcttcctggagaacatttgcccgtatactagtcccttctctgctgcctagaaaacagaccgggtctcacccctgtgaaatcttggtggtttacgaagtcctctggatttcttgatattatcagggatattcataagcatatatcaaaaatggacctattttgatattctgttatgaaaatgttattagaaccccaataaattattatttttcccccttgaatctgctaaagaaaacagatcctgacttagcttacttgaaataagcagggcagggagccctgttttggaagagacagactgtggaagagattacaaacaaggcccgaggctgcacgaatgatgagttttgtgtatataatgttaatgtccaccgccacttccctaacgactatgagatcttttttttgaagatcctcatggaaggttgtacagagccccacatttgaggggaagtcctttcagttgatatgagatctctttaacacccctcagtctatgtaggaaatgccttgtgatacatagagaaccctcagcttctctctgcctctggaggaccaaggtctttcctgacagtcggagacacaccttgatgtatgttaataaaagcatttcaggctgtggggccaccatgtatattaatactccttatgtgtccagcatctgtgtattcattcgagtgcccaatccctggatgagatgaactaggccttataaaaagtcaaagcctcaaagaaatggcacaaccatgttcttcggcactcaggctcctaattgcagatcctcacgaagggtggtatgtggagctggaaggtcttgtggccacaggacatgctggtgagccctgagctggccttgtgcagagggctccgttcaaaggctcggggtgtctttgaggttgtttatcaagctggggaactcttccaagtctgacaatgtttcgaaccctttttgcaaggttgcactattagtataccatcatgtccggaaaacttttaatcttctcaaatatctgatgtaactaccagaaagtcccttacttcctatgaccaatcaggaccaagtcttggaggtgatgtgttacattacgtgcagcacaatagtaccgatcagttaactcagcgctgaagggcttgttttatgaaaggtactattccttctttcacattaactggaaacctctttttttacctgttgttcacaactagttttcttattgactgtattggactgtctcttcttgtagagactgattttggccaacatattaatgcatgttttatgcaaaacacaaatatgatattagttgcttttaaggagttctggcattgtatgtgcatttttgtagaaattgttactggacttataattacatacttaactctgatcaggtttctgtaaaatttaaataaaaccaatacaaaataaaaaaaaaaaaaaa

SEQ ID NO: 265 - protein, 274 aa, Homo sapiens
MIQCVVCEDWFHGRHLGAIPPESGDFQEMVCQACMKRCSFLWAYAAQLAVTKISTEDDGLVRNIDGIGDQEVIKPENGEHQDSTLKEDVPEQGKDDVREVKVEQNSEPCAGSSSESDLQTVFKNESLNAESKSGCKLQELKAKQLIKKDTATYWPLNWRSKLCTCQDCMKMYGDLDVLFLTDEYDTVLAYENKGKIAQATDRSDPLMDTLSSMNRVQQVELICEYNDLKTELKDYLKRFADEGTVVKREDIQQFFEEFQSKKRRRVDGMQYYCS

SEQ ID NO: 266 - DNA, 3289 bp, Homo sapiens
cgcggagcggaggccgaggcgagagcctggcgctgtaggactagaacgaaaggagtgaggcgccgagagcccagataccattttggcgtgagagctggtggttggcaaggccgcgggagtgggaagcgtccgccatgttctgcgaaaaagccatggaactgatccgcgagctgcatcgcgcgcccgaagggcaactgcctgccttcaacgaggatggactcagacaagttctggaggagatgaaagctttgtatgaacaaaaccagtctgatgtgaatgaagcaaagtcaggtggacgaagtgatttgataccaactatcaaatttcgacactgttctctgttaagaaatcgacgctgcactgtagcatacctgtatgaccgcttgcttcggatcagagcactcagatgggaatatggtagcgtcttgccaaatgcattacgatttcacatggctgctgaagaaatggagtggtttaataattataaaagatctcttgctacttatatgaggtcactgggaggagatgaaggtttggacattacacaggatatgaaaccaccaaaaagcctatatattgaagtccggtgtctaaaagactatggagaatttgaagttgatgatggcacttcagtcctattaaaaaaaaatagccagcactttttacctcgatggaaatgtgagcagctgatcagacaaggagtcctggagcacatcctgtcatgaccatgcgccgaggcacttccaggcttcactcaactcatggactcctctgtactcactctctccaccactcccttcacctccctctttgattttagaagctatagacattgtttaagataactaagaatacttggctaagaagtataatttgctaactattaaggactttctttttttaatgttgtacactattcttcctactcttttttggttttggttttgttttgtagagactgtctcactatgttgcccaagctggtctcaaactcctggcctcaagcagtcctcccaccttagcttctcaaagtgttgagatcacaggcgtgagccactgcacccggcccctactcctttttctaataagctgtatctgtaatcacagcattcctacagttgttacagtgtgttttttaaatgaaagtaaacatggttacatttgaatctcttaaataagcagtcacttggctggacaggaagaaggtagatcctgtgtgtcttgttttctggtcatgtgtattgtacaagctagagagctgaatttctgagatacacattttcaaatcacatgcaagtgaagatgatggtctgtagaaattttcagtatatataatgtttaatgacatactaatttatcatctggctatttgggaaggaaggacacacatggattttgcacatttccaccatggtggctggtgtggcttgtggctatggggtgatcaccagtatcaccactttggaaggggacagtgaaattggggctagagaaggaactttgtacagttttccctgagattcagattgactgaaaagtcacatgaagagttgattgtcttttaatggtatgttttaaacagctgacattttaaattttgatgaaatccagtttattcgtttgttcttttatgctttgggtgttgcatccgagaaatcttttcccatcccaagatcacaattttttttcctttttacttctagaagtgttataattttaagctttatactttggtctatgacccgtttttttttttgttttgttttgttttttcgtttgtttctttgttttgagatggagtcttgttctgtcacccaggctggggtgcagtggcgtgatcttggctcactgcaatctctatcccctgggttcaagtgattctcttgtctcagcctcccaagtagctgggattacaggcacaggccgccacgcctggctaatttttgtatttttagtagagacagagttttaccatgttggccaggctggtttcaaactcctgacctcaagtgacccaccttggcctcccaaagttttgggattacaagtgtgggccaccgcggccagcctatgatccattttgaatgaattttttatatggtgcaaggtgtcaatccaccttcactttttcttgggaatatagatatccagctgtttcactaccattttttgaaaggactgccctttgctctatcacctttgcatttttgttaaaaagtagttgtcaatgtatatgtgggtttatttcaggactctgttttgttccattgacctgtttttctctcctgaatgccaataccatatttgtatgtagtgtatgtaattttctaataattcttgaaacagatagtattaatgtgtcatatttttgctgttgtttgtattttttgtagagatggggtttcaccgtgttggccaggctgtgttgaactcctgagctaaagcaatacacttgcctcgtcctccccatgtgctgggattacaggcgtgagccttggtgctggcccagtgtaccacatttctttttgagatttgttttggctatgttaagtcctttgcttttgatgtgaaatttgggaacaggcagggtgtggtggcttatgcctgtaatcctagaactttgggaggcctagatgggtggatcacttgagctcaggagttccagaccagcccgggcctatggcaaaactccgtctctacaaaaaatagaaaaaattagccaggtgtggtggtgcatgcctgtagtcacagttacacggcaggctgaggtgggaggatcacttgaaccccagaggtcaagactgcagtgagctgagatcacaccactgtactccagcctgggtgacaaagtgagactctatctcaaaaagaaattaggatcaatttgtcaatttctacaacaacaacaacaaaaacccctgttgggcaccttgattgagattgcattgaatttatataaaactgttgggagaattgacatcttaataatattgagtcttctggcctataaacaaggtctgtcttcctaggtattaatgttttgtcttctatttctcttaataatcttttgtagttttcagtgtacaggtctaccatgtcagcatttcatagttttgatgctaaatggtattttaaaatttcaaattctaaccacttgttgctagtaaatagaaatacaattgatgttgaacttgtatccttcagccttgctaaactgtgagttctcatggtgtttttgtaaattacatcaacagtcatgtgttctatgaataaagagttttactccttc

SEQ ID NO: 267 - protein, 196 aa, Homo sapiens
MFCEKAMELIRELHRAPEGQLPAFNEDGLRQVLEEMKALYEQNQSDVNEAKSGGRSDLIPTIKFRHCSLLRNRRCTVAYLYDRLLRIRALRWEYGSVLPNALRFHMAAEEMEWFNNYKRSLATYMRSLGGDEGLDITQDMKPPKSLYIEVRCLKDYGEFEVDDGTSVLLKKNSQHFLPRWKCEQLIRQGVLEHILS

SEQ ID NO: 268 - DNA, 3486 bp, Homo sapiens
gagccgactgcggctgcgcggggtattcgaatcggcggcggcttctagtttgcggttcaggtttggccgctgccggccagcgtcctctggccatggacaccccggaaaatgtccttcagatgcttgaagcccacatgcagagctacaagggcaatgaccctcttggtgaatgggaaagatacatacagtgggtagaagagaattttcctgagaataaagaatacttgataactttactagaacatttaatgaaggaatttttagataagaagaaataccacaatgacccaagattcatcagttattgtttaaaatttgctgagtacaacagtgacctccatcaattttttgagtttctgtacaaccatgggattggaaccctgtcatcccctctgtacattgcctgggcggggcatctggaagcccaaggagagctgcagcatgccagtgctgtccttcagagaggaattcaaaaccaggctgaacccagagagttcctgcaacaacaatacaggttatttcagacacgcctcactgaaacccatttgccagctcaagctagaacctcagaacctctgcataatgttcaggttttaaatcaaatgataacatcaaaatcaaatccaggaaataacatggcctgcatttctaagaatcagggttcagagctttctggagtgatatcttcagcttgtgataaagagtcaaatatggaacgaagagtgatcacgatttctaaatcagaatattctgtgcactcatctttggcatccaaagttgatgttgagcaggttgttatgtattgcaaggagaagcttattcgtggggaatcagaattttcctttgaagaattgagagcccagaaatacaatcaacggagaaagcatgagcaatgggtaaatgaagacagacattatatgaaaaggaaagaagcaaatgcttttgaagaacagctattaaaacagaaaatggatgaacttcataagaagttgcatcaggtggtggagacatcccatgaggatctgcccgcttcccaggaaaggtccgaggttaatccagcacgtatggggccaagtgtaggctcccagcaggaactgagagcgccatgtcttccagtaacctatcagcagacaccagtgaacatggaaaagaacccaagagaggcacctcctgttgttcctcctttggcaaatgctatttctgcagctttggtgtccccagccaccagccagagcattgctcctcctgttcctttgaaagcccagacagtaacagactccatgtttgcagtggccagcaaagatgctggatgtgtgaataagagtactcatgaattcaagccacagagtggagcagagatcaaagaagggtgtgaaacacataaggttgccaacacaagttcttttcacacaactccaaacacatcactgggaatggttcaggcaacgccatccaaagtgcagccatcacccaccgtgcacacaaaagaagcattaggtttcatcatgaatatgtttcaggctcctacacttcctgatatttctgatgacaaagatgaatggcaatctctagatcaaaatgaagatgcatttgaagcccagtttcaaaaaaatgtaaggtcatctggggcttggggagtcaataagatcatctcttctttgtcatctgcttttcatgtgtttgaagatggaaacaaagaaaattatggattaccacagcctaaaaataaacccacaggagccaggacctttggagaacgctctgtcagcagacttccttcaaaaccaaaggaggaagtgcctcatgctgaagagtttttggatgactcaactgtatggggtattcgctgcaacaaaaccctggcacccagtcctaagagcccaggagacttcacatctgctgcacaacttgcgtctacaccattccacaagcttccagtggagtcagtgcacattttagaagataaagaaaatgtggtagcaaaacagtgtacccaggcgactttggattcttgtgaggaaaacatggtggtgccttcaagggatggaaaattcagtccaattcaagagaaaagcccaaaacaggccttgtcgtctcacatgtattcagcatccttacttcgtctgagccagcctgctgcaggtggggtacttacctgtgaggcagagttgggcgttgaggcttgcagactcacagacactgacgctgccattgcagaagatccaccagatgctattgctgggctccaagcagaatggatgcagatgagttcacttgggactgttgatgctccaaacttcattgttgggaacccatgggatgataagctgattttcaaacttttatctgggctttctaaaccagtgagttcctatccaaatacttttgaatggcaatgtaaacttccagccatcaagcccaagactgaatttcaattgggttctaagctggtctatgtccatcaccttcttggagaaggagcctttgcccaggtgtacgaagctacccagggagatctgaatgatgctaaaaataaacagaaatttgttttaaaggtccaaaagcctgccaacccctgggaattctacattgggacccagttgatggaaagactaaagccatctatgcagcacatgtttatgaagttctattctgcccacttattccagaatggcagtgtattagtaggagagctctacagctatggaacattattaaatgccattaacctctataaaaatacccctgaaaaagtgatgcctcaaggtcttgtcatctcttttgctatgagaatgctttacatgattgagcaagtgcatgactgtgaaatcattcatggagacattaaaccagacaatttcatacttggaaacggatttttggaacaggatgatgaagatgatttatctgctggcttggcactgattgacctgggtcagagtatagatatgaaactttttccaaaaggaactatattcacagcaaagtgtgaaacatctggttttcagtgtgttgagatgctcagcaacaaaccatggaactaccagatcgattactttggggttgctgcaacagtatattgcatgctctttggcacttacatgaaagtgaaaaatgaaggaggagagtgtaagcctgaaggtctttttagaaggcttcctcatttggatatgtggaatgaattttttcatgttatgttgaatattccagattgtcatcatcttccatctttggatttgttaaggcaaaagctgaagaaagtatttcaacaacactatactaacaagattagggccctacgtaataggctaattgtactgctcttagaatgtaagcgttcacgaaaataaaatttggatatagacagtccttaaaaatcacactgtaaatatgaatctgctcactttaaacctgtttttttttcatttattgtttatgtaaatgtttgttaaaaataaatcccatggaatatttccatgtaaaaaa

SEQ ID NO: 269 - protein, 1085 aa, Homo sapiens
MDTPENVLQMLEAHMQSYKGNDPLGEWERYIQWVEENFPENKEYLITLLEHLMKEFLDKKKYHNDPRFISYCLKFAEYNSDLHQFFEFLYNHGIGTLSSPLYIAWAGHLEAQGELQHASAVLQRGIQNQAEPREFLQQQYRLFQTRLTETHLPAQARTSEPLHNVQVLNQMITSKSNPGNNMACISKNQGSELSGVISSACDKESNMERRVITISKSEYSVHSSLASKVDVEQVVMYCKEKLIRGESEFSFEELRAQKYNQRRKHEQWVNEDRHYMKRKEANAFEEQLLKQKMDELHKKLHQVVETSHEDLPASQERSEVNPARMGPSVGSQQELRAPCLPVTYQQTPVNMEKNPREAPPVVPPLANAISAALVSPATSQSIAPPVPLKAQTVTDSMFAVASKDAGCVNKSTHEFKPQSGAEIKEGCETHKVANTSSFHTTPNTSLGMVQATPSKVQPSPTVHTKEALGFIMNMFQAPTLPDISDDKDEWQSLDQNEDAFEAQFQKNVRSSGAWGVNKIISSLSSAFHVFEDGNKENYGLPQPKNKPTGARTFGERSVSRLPSKPKEEVPHAEEFLDDSTVWGIRCNKTLAPSPKSPGDFTSAAQLASTPFHKLPVESVHILEDKENVVAKQCTQATLDSCEENMVVPSRDGKFSPIQEKSPKQALSSHMYSASLLRLSQPAAGGVLTCEAELGVEACRLTDTDAAIAEDPPDAIAGLQAEWMQMSSLGTVDAPNFIVGNPWDDKLIFKLLSGLSKPVSSYPNTFEWQCKLPAIKPKTEFQLGSKLVYVHHLLGEGAFAQVYEATQGDLNDAKNKQKFVLKVQKPANPWEFYIGTQLMERLKPSMQHMFMKFYSAHLFQNGSVLVGELYSYGTLLNAINLYKNTPEKVMPQGLVISFAMRMLYMIEQVHDCEIIHGDIKPDNFILGNGFLEQDDEDDLSAGLALIDLGQSIDMKLFPKGTIFTAKCETSGFQCVEMLSNKPWNYQIDYFGVAATVYCMLFGTYMKVKNEGGECKPEGLFRRLPHLDMWNEFFHVMLNIPDCHHLPSLDLLRQKLKKVFQQHYTNKIRALRNRLIVLLLECKRSRK

SEQ ID NO: 270 - DNA, 3413 bp, Homo sapiens
aaaaaggaactgggatcgcgccgcggcggttcctgtccttacagttgcgctgcccagggaccgatgttgcgcgaggaaaatgcgggacgcccaggtcggtgctcggcccagacttatgcccgtgttttcacagcccacactcgtgcccgaagccccttaccccgccccgggctgtggtctgtgggctgtgggacgagctgcggcgcgggccatttctgagcagtggaggtttcaagtaatccactaacaaccagttccaaattctgtcatcaaatcctgtgctgctgttcctcgtggtaatagatgcatattatttcttttatttaaaagaaatgaatgtgactagtattgcattaagagctggaacttggcttttagctgcatggcatgttaaagtacctccgatgtggctggaagcttgtattaactggattcaagaagaaaataataatgttaacttgagtcaggcccaaatgaataaacaagtgtttgagcagtggctccttactgatctgagggatttggagcatcctcttttacccgatggcattttagaaattccaaaaggagaattaaatggattttatgctctgcagattaattccttggttgatgtaagtcagcctgcatactcccagatacagaagttgagaggaaagaatacaacaaatgatctagttacagctgaagcacaagtaaccccaaaaccttgggaagcaaagccttcacgaatgttgatgctgcagctaactgatggaatcgtacaaatacagggaatggaatatcagcctattccaattcttcatagtgatcttcctccaggtacaaaaattttgatttatggaaatatatctttccgtcttggtgttctcttattgaaaccagaaaacgtgaaagtgttaggaggtgaagtagatgctcttttagaagaatatgcccaagaaaaagtacttgcaagattaataggggaacctgatcttgtagtttcagtcataccaaacaattctaacgaaaacattcccagagttacagatgttctagatcctgcattaggtccttctgatgaagaactcttggcaagtcttgatgaaaatgatgagcttacaacaaataatgacacttcctcagaacgatgtttcaccacaggtagttcctcaaataccattcccacaagacagtcaagttttgagccagaatttgttatttctccaagaccaaaagaggaaccatcaaacctatctatacatgtaatggatggagaattagatgacttttcactggaggaggccttgcttttagaagaaactgtccagaaagaacagatggaaactaaggaattgcaaccattgacttttaacagaaatgccgatcgaagtatagagagattttcacataatcctaatactacgaataacttttctttgacttgcaaaaatggaaacaataattggagtgaaaaaaatgtatctgaacaaatgactaatgaagacaaatcatttggttgtccatctgttagagaccaaaacaggagtattttttcagttcattgtaatgtacccttagcccatgattttacaaataaagaaaagaacttagagacagataataaaataaaacaaaccagcagttcagatagccattccttaaataataaaatattaaatagagaggtggtcaactatgtacagaaaaggagttcacaaatttctaatgaaaatgattgtaatttacagagttgttctttaagatcatcagagaatagcattaatctttctattgccatggatttgtattctccaccctttgtctatttgtctgttctaatggccagcaaaccaaaggaagttacaacagtgaaagtgaaagcatttattgtaaccttaactggaaatctctcaagttctggtggtatttggagtataactgcaaaggtgtctgatggtactgcatatctagatgtagactttgtggatgaaatacttactagcttgatagggttctcagtaccagaaatgaaacagtcaaaaaaggatcctcttcaataccaaaagttcctggaagggttgcagaaatgtcaaagagatctaatagatttgtgctgtctaatgactatttcatttaatccttccttgtctaaagcaatggtactggcattacaagatgttaatatggaacaccttgagaatctaaagaagcggttaaataaataattaaactaaaatagtattaggaacaattaaaaacaacaaggaaatatttagaatttgttcacaattttacttatgatactttgtgtaaaaaggaaaaatgaaatttcatagcttatttcagtttaattttaaagtgtttaatcatgtttgttatatgtggagcttttgaaaataagttaatctttttttttttttttaatgtcagggtattgctctgttgcccaggctagagtgcagtggcatgatcataggttattgcatcaacctcttgagctcaagcgatcctcctgccttagcctcttgagttgctgggactataggcatgtaccaccatgcccagctaatttataattactattattgttttgtagggacagagttttgctatgttgcccagattggtctcaaactcctggcctctcactcctgccgtcatggcctccaaagtttaatttttttaaaagtaactgttagatggaggaatatggtgacccactattgttgagaaatttgttttccacttgtcacgtcacataagatgattgctaaaatattgtactggtgttcggtggtgagtcatatttttgaaagttaataattataaataggtaatttccttctaatatgttggtactgtctatggccataccaccctgaacatgcctgagcttgtcataatatgttgagtacccaaaagatttgtttatattgttaatcttagggaaaaaaaattaaaatccagtagatcagaacatcaggctttcagatacaaattgatttactggtttttattttgctgattataatatttggtatatttaaggtaatctagttaactagatgctatttcatagattatattgaatgatttaaaactttattttcaaggatagtttattttaaatggcatattgaaaacatcattattaagatccagtaggtaggacatttattggattaaaatgaagcatttatctatgtctttaggtgtcattgttccctttctgaattagctgtacatataagccttcctttggttttaagtactgatttttttttaaaaaaagagggactgtttaccattcttccactgtgctgttataaagttgtatttgaaaggtaatgttgtttttattaatcttttgtcttaaaataatttaaagtgctttgaattttaaaacattaaacaaatccttaaataac

SEQ ID NO: 271 - protein, 625 aa, Homo sapiens
MNVTSIALRAGTWLLAAWHVKVPPMWLEACINWIQEENNNVNLSQAQMNKQVFEQWLLTDLRDLEHPLLPDGILEIPKGELNGFYALQINSLVDVSQPAYSQIQKLRGKNTTNDLVTAEAQVTPKPWEAKPSRMLMLQLTDGIVQIQGMEYQPIPILHSDLPPGTKILIYGNISFRLGVLLLKPENVKVLGGEVDALLEEYAQEKVLARLIGEPDLVVSVIPNNSNENIPRVTDVLDPALGPSDEELLASLDENDELTTNNDTSSERCFTTGSSSNTIPTRQSSFEPEFVISPRPKEEPSNLSIHVMDGELDDFSLEEALLLEETVQKEQMETKELQPLTFNRNADRSIERFSHNPNTTNNFSLTCKNGNNNWSEKNVSEQMTNEDKSFGCPSVRDQNRSIFSVHCNVPLAHDFTNKEKNLETDNKIKQTSSSDSHSLNNKILNREVVNYVQKRSSQISNENDCNLQSCSLRSSENSINLSIAMDLYSPPFVYLSVLMASKPKEVTTVKVKAFIVTLTGNLSSSGGIWSITAKVSDGTAYLDVDFVDEILTSLIGFSVPEMKQSKKDPLQYQKFLEGLQKCQRDLIDLCCLMTISFNPSLSKAMVLALQDVNMEHLENLKKRLNK

SEQ ID NO: 272 - DNA, 1372 bp, Homo sapiens
gcacgagggcgcttttgtctccggtgagttttgtggcgggaagcttctgcgctggtgcttagtaaccgactttcctccggactcctgcacgacctgctcctacagccggcgatccactcccggctgttcccccggagggtccagaggcctttcagaaggagaaggcagctctgtttctctgcagaggagtagggtcctttcagccatgaagcatgtgttgaacctctacctgttaggtgtggtactgaccctactctccatcttcgttagagtgatggagtccctagaaggcttactagagagcccatcgcctgggacctcctggaccaccagaagccaactagccaacacagagcccaccaagggccttccagaccatccatccagaagcatgtgataagacctccttccatactggccatattttggaacactgacctagacatgtccagatgggagtcccattcctagcagacaagctgagcaccgttgtaaccagagaactattactaggccttgaagaacctgtctaactggatgctcattgcctgggcaaggcctgtttaggccggttgcggtggctcatgcctgtaatcctagcactttgggaggctgaggtgggtggatcacctgaggtcaggagttcgagaccagcctcgccaacatggcgaaaccccatctctactaaaaatacaaaagttagctgggtgtggtggcagaggcctgtaatcccagttccttgggaggctgaggcgggagaattgcttgaacccggggacggaggttgcagtgaaccgagatcgcactgctgtacccagcctgggccacagtgcaagactccatctcaaaaaaaaaaagaaaagaaaaagcctgtttaatgcacaggtgtgagtggattgcttatggctatgagataggttgatctcgcccttaccccggggtctggtgtatgctgtgctttcctcagcagtatggctctgacatctcttagatgtcccaacttcagctgttgggagatggtgatattttcaaccctacttcctaaacatctgtctggggttcctttagtcttgaatgtcttatgctcaattatttggtgttgagcctctcttccacaagagctcctccatgtttggatagcagttgaagaggttgtgtgggtgggctgttgggagtgaggatggagtgttcagtgcccatttctcattttacattttaaagtcgttcctccaacatagtgtgtattggtctgaagggggtggtgggatgccaaagcctgctcaagttatggacattgtggccaccatgtggcttaaatgattttttctaactaataaagtggaatatatatttcaaaaaaaaaaaaaaaaaa

SEQ ID NO: 273 - protein, 63 aa, Homo sapiens
MKHVLNLYLLGVVLTLLSIFVRVMESLEGLLESPSPGTSWTTRSQLANTEPTKGLPDHPSRSM

SEQ ID NO: 274 - DNA, 2979 bp, Homo sapiens
agcaaaccaatcgcaagcctcgttgagtggaaggggtgggatcttccccggaagttttggttaaagcccctccaatcagcggctcggtgcggcaagtttgaatttcgtggaggctcgggttgtgagggttcctgcttcggagtcggcggtggtcgtccagaccgagtgttctttactttttgtttggttgaggtttcacgctagaaggtggctcaggatgtcttcatcacattttgccagtcgacacaggaaggatataagtactgaaatgattagaactaaaattgctcataggaaatcactgtctcagaaagaaaatagacataaggaatacgaacgaaatagacactttggtttgaaagatgtaaacattccaaccttggaaggtagaattcttgttgaattagatgagacatctcaagagcttgttccagaaaagaccaatgttaagccaagggcaatgaaaactattctaggtgatcaacgaaaacagatgctccaaaaatacaaagaagaaaagcaacttcaaaaattgaaagagcagagagagaaagctaaacgaggaatatttaaagtgggtcgttatagacctgatatgccttgttttcttttatcaaaccagaatgctgtgaaagctgagccaaaaaaggctattccatcttctgtacggattacaaggtcaaaggccaaagaccaaatggagcagactaagattgataacgagagtgatgttcgagcaatccgacctggtccaagacaaacttctgaaaagaaagtgtcagacaaagagaaaaaagttgtgcagcctgtaatgcccacgtcgttgagaatgactcgatcagctactcaagcagcaaagcaggttcccagaacagtctcatctaccacagcaagaaagccagtcacaagagctgctaatgaaaacgaaccagaaggaaaggtgccaagtaaaggaagacctgccaaaaatgtagaaacaaaacccgacaagggtatttcttgtaaagtcgatagtgaagaaaatactttgaattcacaaactaatgcaacaagtggaatgaatccagatggagtcttatcaaaaatggaaaacttacctgagataaatactgcaaaaataaaagggaagaattccttcgcacctaaggattttatgtttcagccactggatggtctgaagacctatcaagtaacacctatgactcccagaagtgccaatgcttttttgacacccagttacacctggactcctttaaaaacagaagttgatgagtctcaagcaacaaaagaaattttggcacaaaaatgtaaaacttactctaccaagacaatacagcaagattcaaataaattgccatgtcctttgggtcctctaactgtttggcatgaagaacatgttttaaataaaaatgaagctactactaaaaatttaaatggccttccaataaaagaagtcccatcacttgaaagaaatgaaggtcgaattgctcagccccaccatggtgtgccatatttcagaaatatcctccagtcagaaactgagaaattaacttcacattgcttcgagtgggacaggaaacttgaattggacattccagatgatgctaaagatcttattcgcacagcagttggtcaaacaagactccttatgaaggaaaggtttaaacagtttgaaggactggttgatgattgtgaatataaacgaggtataaaggagactacctgtacagatctggatggattttgggatatggttagttttcagatagaagatgtaatccacaaattcaacaatctgatcaaacttgaggaatctgggtggcaagtcaataataatatgaatcataatatgaacaaaaatgtctttaggaaaaaagttgtctcaggtatagcaagtaaaccaaaacaggatgatgctggaagaattgcagcgagaaatcgcctagctgccataaaaaatgcaatgagagagagaattaggcaggaagaatgtgctgaaacagcagtttctgtgataccaaaggaagttgataaaatagtgttcgatgctggatttttcagagttgaaagtcctgttaaattattctcaggactttctgtctcttctgaaggcccttctcaaagacttggaacacctaagtctgtcaacaaagctgtatctcagagtagaaatgagatgggcattccacaacaaactacatcaccagaaaatgccggtcctcagaatacgaaaagtgaacatgtgaagaagactttgtttttgagtattcctgaaagcaggagcagcatagaagatgctcagtgtcctggattaccagatttaattgaagaaaaccatgttgtaaataagacagacttgaaggtggattgtttatccagtgagagaatgagtttgcctcttcttgctggtggagtagcagatgatattaatactaacaaaaaagaaggaatttcagatgttgtggaaggaatggaactgaattcttcaattacatcacaggatgttttgatgagtagccctgaaaaaaatacagcttcacaaaatagcatcttagaagaaggggaaactaaaatttctcagtcagaactatttgataataaaagtctcactactgaatgccaccttcttgattcaccaggtctaaactgcagtaatccatttactcagctggagaggagacatcaagaacatgccagacacatttcttttggtggtaacctgattactttttcacctctacaaccaggagaattttgaatttaaaaataaatccaaacattttccttcatattatcaatgcttatatattccttagactattgaaattttggagaaaatgtatttgtgttcacttctatagcatataatgttttaatattctgtgttcatcaaagtgtattttagatatactctttctcaagggaagtggggatattttgtacattttcaacacagaataaaaaatgtactgtgccttg

SEQ ID NO: 275 - protein, 846 aa, Homo sapiens
MSSSHFASRHRKDISTEMIRTKIAHRKSLSQKENRHKEYERNRHFGLKDVNIPTLEGRILVELDETSQELVPEKTNVKPRAMKTILGDQRKQMLQKYKEEKQLQKLKEQREKAKRGIFKVGRYRPDMPCFLLSNQNAVKAEPKKAIPSSVRITRSKAKDQMEQTKIDNESDVRAIRPGPRQTSEKKVSDKEKKVVQPVMPTSLRMTRSATQAAKQVPRTVSSTTARKPVTRAANENEPEGKVPSKGRPAKNVETKPDKGISCKVDSEENTLNSQTNATSGMNPDGVLSKMENLPEINTAKIKGKNSFAPKDFMFQPLDGLKTYQVTPMTPRSANAFLTPSYTWTPLKTEVDESQATKEILAQKCKTYSTKTIQQDSNKLPCPLGPLTVWHEEHVLNKNEATTKNLNGLPIKEVPSLERNEGRIAQPHHGVPYFRNILQSETEKLTSHCFEWDRKLELDIPDDAKDLIRTAVGQTRLLMKERFKQFEGLVDDCEYKRGIKETTCTDLDGFWDMVSFQIEDVIHKFNNLIKLEESGWQVNNNMNHNMNKNVFRKKVVSGIASKPKQDDAGRIAARNRLAAIKNAMRERIRQEECAETAVSVIPKEVDKIVFDAGFFRVESPVKLFSGLSVSSEGPSQRLGTPKSVNKAVSQSRNEMGIPQQTTSPENAGPQNTKSEHVKKTLFLSIPESRSSIEDAQCPGLPDLIEENHVVNKTDLKVDCLSSERMSLPLLAGGVADDINTNKKEGISDVVEGMELNSSITSQDVLMSSPEKNTASQNSILEEGETKISQSELFDNKSLTTECHLLDSPGLNCSNPFTQLERRHQEHARHISFGGNLITFSPLQPGEF

SEQ ID NO: 276 - DNA, 7364 bp, Homo sapiens
gtaaagcggagcggctgcagcctgctgttgagtgagaaaacaaaattatcttcctttccaaatccaaaaagatgaaaacgactgagatactttcaaaagacaaccaagtgagcagcacagactaatgagtagaatcaataagaacgtggttttggcccttttaacgctgacaagttctgcatttctgctgtttcagttgtactactacaagcactatttatcaacaaagaatggagctggtttgtcaaaatccaaaggaagccgaattggatttgatagcacacagtggcgtgcagttaaaaaatttattatgttaacatccaaccaaaatgtaccagtgtttcttattgatcctttgatactggaattgattaataagaactttgaacaagtcaaaaatacttctcatggctctacttcacaatgcaagtttttctgtgttccaagagactttactgcatttgcactgcagtatcacctatggaagaatgaggaaggctggtttcggatagctgagaatatgggatttcagtgcctaaagattgagagtaaagatccccggctagacgggatagactcactctctggaactgaaatccccctgcactatatctgcaaactggccactcatgcgatccacttggtagtctttcatgagaggagtggcaactacctctggcacggccacttgagacttaaagaacacattgacaggaaatttgttcccttccgaaagttacagtttggtcgttatccaggagcttttgacaggccagagttacagcaagttactgttgatggactggaagttctcattccaaaggatccaatgcactttgtagaagaagtaccacactctaggtttattgagtgtaggtataaagaagctcgagcattctttcagcagtaccttgatgataacactgtggaagctgtggcctttcggaagagtgcaaaggaattactgcaactagcagcgaaaacattaaacaaattgggagtaccattctggctgagcagtggaacttgtctaggatggtatcgacaatgcaacattattccttatagcaaagatgttgacctaggaatttttatacaagattacaaatctgatattattttagcatttcaggatgcaggacttccgctcaaacacaaatttgggaaggtagaagacagcttggaactatccttccagggaaaagatgatgtaaaacttgatgtttttttcttctatgaagaaactgatcacatgtggaatggaggcactcaggccaaaacaggaaaaaaattcaaatacctgtttccgaagtttacactgtgctggactgagtttgtagacatgaaggtccatgtaccctgtgaaaccctcgaatacattgaagccaactatggtaagacctggaagattcctgtaaagacgtgggactggaagcgctctcctcccaatgtgcaacccaatggaatctggcctatttctgagtgggatgaggttatccagttatattgagatagtaggttgaaatgggagaatttctcttttggaaaaaaaggtagataactgtttaaaaaatacatgtctatttgtcaaacataagtgggaaccaaagaaaaaatgtgacaagtttgaagacacagaaagagtcatctgatgtaattctctcacttagtactgaggaattttcatgtgccacatacaatgctaggttacagtggagaagcctagatgaatgagacaaatacctacttcttttattcctccttttggtaaacaactcaattttcctttgagggaaccctcccccaccctttgaagagttcaagttctgtacaggtttttaaaacgtgaagtaatgtttgaactggaagatgagctcaccaggcaaagctaaggaaggatatactagttgaaaagaataacccactcctcttctgggcatttaagctggtatgttagtgctacttttaagattgtggagtctgagttaatattcaagtgatcagactttgagtgacatcaagaaaagatgatatcaggttcatttttcaactaatcttatgtggaattgaattagagaacaaggcattattcttttagggaaggtgagagcttatttgtatcagagcttattacttgtcaggataagtaaatttctgtacatgtactgttttcatatgtgaagtgagaagaaactttatgcttgtttaatgcttaaatttccatccattgtgagaatattttcactgacctctgatggcacttgttgacaaatcattcaagtgagaccatgttactagacatgatcttgaaagaggccatgatttcacaaaactcatttttattttattctcagacagtctgttaggtaaaaatatgagaaattcatgtacattttatattttctgaatttataatctgtgcactcccaattttaatgacactaaaatattaatagaattttttaaatatactctaatttttaaaacatactctttattatcttcatttatcaattacagcttcgtatctctaatttatggtctatataccaatttaaatggcatgtaaacctgcctgtttcttctcctcttctaatatatcagatctccaaaatggaagctaaatggtggacttgacaactattcaccctacctcagatcatagagtttgtaaagtttgtgtccctccccagtttttcagtctgttgaatgtcgatggggcaagaactcagacttctactttaccaagtaccacacactctggaatgctttagtttccttttcccctcaagatgtctgagtcagctaggatgctgtttaccccatctctctcttatatcacttgaatgatatattgtaagtgagaggtaaaggaaaatgtaggcacaataagcactgctatttttctctttgtctaggaaaggaagctgaatcttatatcttatctatgctatttaggactactttctggagcttggcagattttcctctgacaccagagaacaatagtagtctcaagaatggaaacctgaatgtctgagggaatgggctggtagactttttcgaaaacaaattagagaaagtaacttacaaccacccattccggatttgtaaagcaacatgaaaacctttgataaatgataaccaacagtcttctgtcctaatttgcattctcaatgcagaattattgggtctttcataaataacatgagtggtttctggagacatttaagattgtcagcaaacttgtcccaaaatggcacatcatcataatccattttctctttgctagaaaatcagcccatagagtgcattcccaaattctaaatagctgaccctaaattcatttttcatgcttaaaaataatagaacaaataataatactatttttgggcaaaatccaccctacttgatgaggaccatttgcttgtgctcagtatttagaaatgcatacactccacatttctccccatttccaattgggactcccattctttgccaggagatcttacccatcccttttcagattaatcttttatcctttcctgaagtacaaagtcttaagagtgtctgaaatccaagacatcttggcccaattgacacaggttctatattcttccctacatagaccactggctgctgaaatacttttcttgtcttctggtttcacaggcttcagctcatgggttccaccctaacttggggaaacaaaagccttctctagaatctgaaggccaggcttacctctgattctgattcatccatacttcatcttatgtattttaacagttgggttctgtggagtgtccagagaccttgggttaggtatatccatcttcagtacctcattggatcacttttctttcatcacttgagtattctagcagtcattctcctaatctgaccactttcaggtttagtttacctggcttacctggggaagttgacaacttgttggtagttaggcacccatgaatgtctccagagacatcctgagaggcaagattcctcttaattgataaccaggacaaccaggtagtcacccagtcctctctaagcagggagcacttgtccttctctcctctgctgcagctactgatatctggcccctggaataaaaccatagttcctaaaattgagcatccctaagagtagctgcttggtgggacagctgatttctttgattccctagctgcaaaacctgaaattgaccactaggtgacagaatgtttgccagtatccccacaaaacaagttaaaacttaagtgaaaatcattctgcttttgaatcttaaaagctagaaaaaccataatgtaatattctttttaaaccctcttattttataactaaataaataatcacagaaaagaatgatctgaacaagaacagctgaggctaaaacccaagactgccgtgactcctagtccaatgtctgtttcgcatcacaacacagtatctttaacagtgcttgagatgcttaacagagaaggcatccagtgcttcattgaggctaagtctcagggtgtttctgccgcttagtatctttttgttcagattgagaacctaaggcgacagagaggtcaaggggaagtattttctagttcagaattcagaattcttaggcaaccttcatacctttatctggaaaatgccttctctccagacaataagacagttcacatctggagacatcagcctttggtacctaattctctaagctcaagatgcatcccattgccactttaccattctatttcccaagggaaccatcagcaccaacctgctaaatgcctgtatttgaagtctctccccttcctgaagtgaccttttatgaggctctttccttcctaagggacctttccctggtagtagtggtctcattcacaaaaaagaataatagatgtaactggagtcactttgcagttttcaagattttttttttatctgcttggctggaaaggagactagagtatctagtttttagtatttaaactacttttaattatttatattgatactctctgataaatgcaggtagttaagaatagattgtactcattcctttttgagtttgtgacctcaaaccattgtttttattcttacacgactacagtacttcaaatggcacatagataggcaggatattacataggtaagcaggaatttatacattgggtaccagagctaaatctggaaaacacatttggaatgagcttccacacttcagtctaaaatctcacccaaacttatggctacatatttttctaagtttcccccctagtttcactttctggaaagtgaacagttttttaaatcctaaatgttataaatccttaggagaaatattccctcaaaacctagtcaagaaagtgccacattcccaccttctaacaggtaattattagttgtaatagctttaatgcatggaaaaacttcagttactgaccagtcaagagaatttctcaagaaaaatcccagcaacgttccctctttcctccttgtcttccactatcattaagacctgggctagatcacctctaacatctcactcagggaaggcaatgtgttgccataaaaagaccacaagcttttgagttaggcctgaatttgaatttcagcttaatcatgtgggatttatggtgggggccctttcagtctcaatttccacattagtgaactggggaaatgatacatacttctaagggtttttagggggattaaatgaagtatacagttcttagcctcaggcctaggattaagtaagtactcaagaaatgtgcaattttctagttccatgtttcttttctaatcttcaaatggaattatagaaaccatgggtcagaacatattcctttactcaaaagattgcatgactgaatttgcttaagaaaaaaaaaattgtatcaagtcattaatacaattatacattaattatattacattaatacaatatatggtttgtgaattcagagacattaccagtttgcctccttctctcaatagaacttgtattttcattttcttggttaagcagttgtctcctaatattatcccatatgctacctagtttgctggtcccaagcagtttactgtacttcactagatttggtacctgctctcccctggacttctttttcaatattctagcctttcctagatgtaaatctttacctccttgttagtgaaattagatataagccatgatttggagagggaagaaatctggaatacttaatttcatttaattatctatgctgatgaatgcctgtatcattgttaataaaggagaattgaaaatactcatttctactttctgccctcaaatttctgtttctatctcaactaggcaagaatcagcagggtgcatgatgccattttaagctgcttcacatcagactgaaatcctaattacagttcataagtgaaacagactaattcaatggcaataccttttgtataggtcctgtgcttaaaggaggcaagtataaattttctaataagaaatccctgcttcttttgggtgcagtggctcacacctgtaataccagcagtttgagaagctaaggcaggtggatcacttgaggccaggagttcgagaccagcctggccaacatagtgaaaccccgtctcttctaaaaatacaaaaaaattagctgggcatggtggtgcacgcctatagtcccagctacacaggaggctgaggcaggagaatcacttgaacccgggaagcagagtctgcagtgagccaagatcgcggcattgcacttcagcctgggcgatagagcaagactctgtctcagaaaaaaaaaaaaaggaaagaaagaaatctctgcttccgtactatcaaaacttctaccctagaataccccctggcaccttctaacccaacctaatacagagattttgtagggacccattaacaagctcctatataattataagcagctctcacagtagggttgaaagagaatataaggaaaattagaagtactgtatttttgctattggaaatgaaatattgtttcatgcacctttgaaaaaaataacaggattttacagccttctgatgattcattcaaagcatggggaatagttcatatgtttgttaaatgaaaatcttatgtagctatttgtgtgtccctcccacttcataactacaaaaacatatatatgaatttctaaacaaagtgatattttaaagatgaattgattcaatgtgtacttaccagtttactgtgtggttttatcttcaggtacagatagtttgtggtactacttgaaaatacctttaatattattttcatcagaatttgtaatatataatccagtttgggatgatgaataaaatttttctaatctcttga

SEQ ID NO: 277 - protein, 461 aa, Homo sapiens
MSRINKNVVLALLTLTSSAFLLFQLYYYKHYLSTKNGAGLSKSKGSRIGFDSTQWRAVKKFIMLTSNQNVPVFLIDPLILELINKNFEQVKNTSHGSTSQCKFFCVPRDFTAFALQYHLWKNEEGWFRIAENMGFQCLKIESKDPRLDGIDSLSGTEIPLHYICKLATHAIHLVVFHERSGNYLWHGHLRLKEHIDRKFVPFRKLQFGRYPGAFDRPELQQVTVDGLEVLIPKDPMHFVEEVPHSRFIECRYKEARAFFQQYLDDNTVEAVAFRKSAKELLQLAAKTLNKLGVPFWLSSGTCLGWYRQCNIIPYSKDVDLGIFIQDYKSDIILAFQDAGLPLKHKFGKVEDSLELSFQGKDDVKLDVFFFYEETDHMWNGGTQAKTGKKFKYLFPKFTLCWTEFVDMKVHVPCETLEYIEANYGKTWKIPVKTWDWKRSPPNVQPNGIWPISEWDEVIQLY

SEQ ID NO: 278 - DNA, 2984 bp, Homo sapiens
ggaaattcaaacgtgtttgcggaaaggagtttgggttccatcttttcatttccccagcgcagctttctgtagaaatggaatccgaggatttaagtggcagagaattgacaattgattccataatgaacaaagtgagagacattaaaaataagtttaaaaatgaagaccttactgatgaactaagcttgaataaaatttctgctgatactacagataactcgggaactgttaaccaaattatgatgatggcaaacaacccagaggactggttgagtttgttgctcaaactagagaaaaacagtgttccgctaagtgatgctcttttaaataaattgattggtcgttacagtcaagcaattgaagcgcttcccccagataaatatggccaaaatgagagttttgctagaattcaagtgagatttgctgaattaaaagctattcaagagccagatgatgcacgtgactactttcaaatggccagagcaaactgcaagaaatttgcttttgttcatatatcttttgcacaatttgaactgtcacaaggtaatgtcaaaaaaagtaaacaacttcttcaaaaagctgtagaacgtggagcagtaccactagaaatgctggaaattgccctgcggaatttaaacctccaaaaaaagcagctgctttcagaggaggaaaagaagaatttatcagcatctacggtattaactgcccaagaatcattttccggttcacttgggcatttacagaataggaacaacagttgtgattccagaggacagactactaaagccaggtttttatatggagagaacatgccaccacaagatgcagaaataggttaccggaattcattgagacaaactaacaaaactaaacagtcatgcccatttggaagagtcccagttaaccttctaaatagcccagattgtgatgtgaagacagatgattcagttgtaccttgttttatgaaaagacaaacctctagatcagaatgccgagatttggttgtgcctggatctaaaccaagtggaaatgattcctgtgaattaagaaatttaaagtctgttcaaaatagtcatttcaaggaacctctggtgtcagatgaaaagagttctgaacttattattactgattcaataaccctgaagaataaaacggaatcaagtcttctagctaaattagaagaaactaaagagtatcaagaaccagaggttccagagagtaaccagaaacagtggcaatctaagagaaagtcagagtgtattaaccagaatcctgctgcatcttcaaatcactggcagattccggagttagcccgaaaagttaatacagagcagaaacataccacttttgagcaacctgtcttttcagtttcaaaacagtcaccaccaatatcaacatctaaatggtttgacccaaaatctatttgtaagacaccaagcagcaataccttggatgattacatgagctgttttagaactccagttgtaaagaatgactttccacctgcttgtcagttgtcaacaccttatggccaacctgcctgtttccagcagcaacagcatcaaatacttgccactccacttcaaaatttacaggttttagcatcttcttcagcaaatgaatgcatttcggttaaaggaagaatttattccattttaaagcagataggaagtggaggttcaagcaaggtatttcaggtgttaaatgaaaagaaacagatatatgctataaaatatgtgaacttagaagaagcagataaccaaactcttgatagttaccggaacgaaatagcttatttgaataaactacaacaacacagtgataagatcatccgactttatgattatgaaatcacggaccagtacatctacatggtaatggagtgtggaaatattgatcttaatagttggcttaaaaagaaaaaatccattgatccatgggaacgcaagagttactggaaaaatatgttagaggcagttcacacaatccatcaacatggcattgttcacagtgatcttaaaccagctaactttctgatagttgatggaatgctaaagctaattgattttgggattgcaaaccaaatgcaaccagatacaacaagtgttgttaaagattctcaggttggcacagttaattatatgccaccagaagcaatcaaagatatgtcttcctccagagagaatgggaaatctaagtcaaagataagccccaaaagtgatgtttggtccttaggatgtattttgtactatatgacttacgggaaaacaccatttcagcagataattaatcagatttctaaattacatgccataattgatcctaatcatgaaattgaatttcccgatattccagagaaagatcttcaagatgtgttaaagtgttgtttaaaaagggacccaaaacagaggatatccattcctgagctcctggctcatccctatgttcaaattcaaactcatccagttaaccaaatggccaagggaaccactgaagaaatgaaatatgttctgggccaacttgttggtctgaattctcctaactccattttgaaagctgctaaaactttatatgaacactatagtggtggtgaaagtcataattcttcatcctccaagacttttgaaaaaaaaaggggaaaaaaatgatttgcagttattcgtaatgtcaaataccacctataaaatatattggactgttatactcttgaatccctgtggaaatctacatttgaagacaacatcactctgaagtgttatcagcaaaaaaaattcagtagattatctttaaaagaaaactgtaaaaatagcaaccacttatggtactgtatatattgtagacttgttttctctgttttatgctcttgtgtaatctacttgacatcattttactcttggaatagtgggtggatagcaagtatattctaaaaaactttgtaaataaagttttgtggctaaaatgacactaaaaaaaaaaaaaaaaaa

SEQ ID NO: 279 - protein, 857 aa, Homo sapiens
MESEDLSGRELTIDSIMNKVRDIKNKFKNEDLTDELSLNKISADTTDNSGTVNQIMMMANNPEDWLSLLLKLEKNSVPLSDALLNKLIGRYSQAIEALPPDKYGQNESFARIQVRFAELKAIQEPDDARDYFQMARANCKKFAFVHISFAQFELSQGNVKKSKQLLQKAVERGAVPLEMLEIALRNLNLQKKQLLSEEEKKNLSASTVLTAQESFSGSLGHLQNRNNSCDSRGQTTKARFLYGENMPPQDAEIGYRNSLRQTNKTKQSCPFGRVPVNLLNSPDCDVKTDDSVVPCFMKRQTSRSECRDLVVPGSKPSGNDSCELRNLKSVQNSHFKEPLVSDEKSSELIITDSITLKNKTESSLLAKLEETKEYQEPEVPESNQKQWQSKRKSECINQNPAASSNHWQIPELARKVNTEQKHTTFEQPVFSVSKQSPPISTSKWFDPKSICKTPSSNTLDDYMSCFRTPVVKNDFPPACQLSTPYGQPACFQQQQHQILATPLQNLQVLASSSANECISVKGRIYSILKQIGSGGSSKVFQVLNEKKQIYAIKYVNLEEADNQTLDSYRNEIAYLNKLQQHSDKIIRLYDYEITDQYIYMVMECGNIDLNSWLKKKKSIDPWERKSYWKNMLEAVHTIHQHGIVHSDLKPANFLIVDGMLKLIDFGIANQMQPDTTSVVKDSQVGTVNYMPPEAIKDMSSSRENGKSKSKISPKSDVWSLGCILYYMTYGKTPFQQIINQISKLHAIIDPNHEIEFPDIPEKDLQDVLKCCLKRDPKQRISIPELLAHPYVQIQTHPVNQMAKGTTEEMKYVLGQLVGLNSPNSILKAAKTLYEHYSGGESHNSSSSKTFEKKRGKK

SEQ ID NO: 280 - DNA, 3736 bp, Homo sapiens
agttgggggaagtgcactgagcgagtggcggccgggggacagtacctgcttgccttattgggcaaatacagccttccaaggtggagtctaacgccgtggtgtgaactggccacccgaacagggagtaaatagtgctttgtatctttaaggaagcccttttttaaatttaaaaaaaaagtcttaattataagactctttaaatgcccaactgcatacttggagctttgggactgaatttggaactttcctgtcaagcgacctcccacgactttactgctgagcctgtgcacgtgtgtgtaaggggagaaatccaggcatctagatgcagacttgtacccagttacttggggtcgcgtgcgctcagctgggacctgggctcgtgcgcttagtccggagccctgatctgcgaacaggatattaaaacttttagtacaattgattggactacttgaaccatcgggatttggggaggaactccagatttttcatttttaaactctaaatgtatgaggaatttacagaatggagaacgaaaaggaaaatctcttttgtgagccacataaaaggggactaatgaaaacacctctgaaagaatccaccacagcaaatatcgtgttggcagagatccagcctgactttggccctttaaccacacctaccaagcccaaggaaggctctcagggagagccgtggacaccgacagccaacctgaaaatgctcatcagtgctgtgagccctgagatccgcaacagagatcagaaaaggggtttgtttgacaacagaagtggattacctgaggccaaagactgtatacacgaacacttatctggagatgaatttgagaaatcccaaccaagtcgaaaagagaaaagtttaggattattgtgtcataagttcttagcacgatatcctaattatcccaaccctgctgtgaataatgacatctgccttgacgaagtggcagaggaacttaatgttgaacgtcgacgcatttacgatatcgtgaacgtcctagagagtttacatatggtgagccgcctcgccaaaaacaggtacacttggcacgggcgacacaatctcaacaaaacccttggcaccttgaagagcatcggggaggagaataagtacgccgagcagattatgatgatcaaaaagaaagaatatgagcaagagtttgactttattaagagttacagtatagaggatcatatcatcaaatcaaacactggcccaaatggacacccagacatgtgttttgtggaactccctggagtggaatttcgggcagcttctgtaaacagccgcaaagacaagtctttaagggtaatgagccagaaatttgtgatgctgtttttggtgtcaacgcctcagatagtaagcctagaagttgctgccaagattttaattggggaggaccatgtggaagatttggataaaagcaagtttaaaacaaaaattaggaggttgtatgatatagctaatgttctgagtagcctggatcttatcaagaaagttcatgttacagaggaaagaggccgaaaaccagctttcaaatggaccggcccagaaatcagtccaaataccagtggctccagcccagtcattcattttactccctctgatttggaggtgagacggtcttcaaaagagaactgtgccaaaaacctcttttccacacgtgggaaaccaaactttactcgacacccatctcttatcaaattggtaaagagtatagaaagtgatcggagaaagataaattctgcgcccagtagccctatcaagaccaacaaagctgagagttctcagaattctgcacccttcccaagtaaaatggctcagctcgcagctatttgtaaaatgcagttagaagagcaatcaagtgaatccagacagaaagtgaaagtacagctggcaagatctggaccctgcaaaccagtagcccctctggaccccccagtgaatgctgagatggagctgacagcaccgtccctcatccagcccctgggaatggttcccctgatccccagccccttgtcatcagcagtgcccctgatcctacctcaggccccttcaggcccatcctatgccatctacctgcagcccactcaagcccaccaaagtgtgacgccaccccaaggcctgagcccaacggtgtgcaccacccactcttctaaagctactggctcaaaagactccacagatgccaccactgagaaggcagccaatgatacctcaaaggccagtgcctctaccaggcctggaagcttgctgccagcaccagagaggcaaggggcaaagagccgaaccagggagccagctggagaaagaggctcaaagagggcaagcatgctcgaggacagtggttccaaaaagaaatttaaagaggacctaaaaggacttgaaaatgtctccgcaaccttgttcccatcaggatacctaatccctctcacgcagtgctcatccctgggggcagagtccattttgtctggtaaagaaaactcaagtgctctttccccaaaccacaggatttacagctccccaattgcaggtgttattccagtgacatcatctgaactcactgctgttaattttccctcttttcatgtaacaccgttgaagctaatggtctcaccaacttccgtggcagccgtacctgtcgggaacagcccggctctcgcttcaagccaccctgttcccatccagaacccaagctcagccattgtaaacttcaccctgcagcacctgggactcatctcacccaatgtgcagttgtctgccagccctgggtctggaatcgttcctgtgtctccaagaatagagtctgttaatgtcgcaccagaaaatgcaggcactcagcaaggaagggccaccaactatgactcaccagtcccaggccagagccagccaaatggacaatcagttgctgtgacaggggcacaacagcctgttcctgtgacacccaaagggtcacaattagtggccgaaagtttcttccgtaccccaggtggacccaccaagccaaccagctcatcctgcatggattttgagggtgctaataaaacctccttaggaactctctttgtcccacagcgaaaactggaagtctcaacagaggatgtccattaatcaacagatgttggcttagtttaattttctaaagagttgtttaatagagaaaatgtacacagactgatttggagaacacattctctgaaaatactgtaaatacgttggggatttgttcaatgtgaaatcagatagttgttttcatacatatatatatatacacacacacacacacacacacacacacatatatttgtataaagctaagtttagctttcaatcctacaaaataaaagtaaaatgttgaactctaagatatattaacttctagggggaaaaatccattattttagctatgcctatactattatgcaaagtaactgtattaaagtttacttccctctaagcaaatatgcttgacatgcctaacacagcattcccttaaacattttgcacaaagaaaatgctgtgtgatgtataatgttgtatttttaaataggggtatagctatattttttgtaatttctttaatctgttgttgcagtgtatctttttgtaaagtttgcaacaatcctcaatcaagtctatggaaaaattatttataaaatgtatttttaatcataagttgttcaaattaaaacttttctaaaaaataaaaaaaaaaaaaaaa

SEQ ID NO: 281 - protein, 867 aa, Homo sapiens
MENEKENLFCEPHKRGLMKTPLKESTTANIVLAEIQPDFGPLTTPTKPKEGSQGEPWTPTANLKMLISAVSPEIRNRDQKRGLFDNRSGLPEAKDCIHEHLSGDEFEKSQPSRKEKSLGLLCHKFLARYPNYPNPAVNNDICLDEVAEELNVERRRIYDIVNVLESLHMVSRLAKNRYTWHGRHNLNKTLGTLKSIGEENKYAEQIMMIKKKEYEQEFDFIKSYSIEDHIIKSNTGPNGHPDMCFVELPGVEFRAASVNSRKDKSLRVMSQKFVMLFLVSTPQIVSLEVAAKILIGEDHVEDLDKSKFKTKIRRLYDIANVLSSLDLIKKVHVTEERGRKPAFKWTGPEISPNTSGSSPVIHFTPSDLEVRRSSKENCAKNLFSTRGKPNFTRHPSLIKLVKSIESDRRKINSAPSSPIKTNKAESSQNSAPFPSKMAQLAAICKMQLEEQSSESRQKVKVQLARSGPCKPVAPLDPPVNAEMELTAPSLIQPLGMVPLIPSPLSSAVPLILPQAPSGPSYAIYLQPTQAHQSVTPPQGLSPTVCTTHSSKATGSKDSTDATTEKAANDTSKASASTRPGSLLPAPERQGAKSRTREPAGERGSKRASMLEDSGSKKKFKEDLKGLENVSATLFPSGYLIPLTQCSSLGAESILSGKENSSALSPNHRIYSSPIAGVIPVTSSELTAVNFPSFHVTPLKLMVSPTSVAAVPVGNSPALASSHPVPIQNPSSAIVNFTLQHLGLISPNVQLSASPGSGIVPVSPRIESVNVAPENAGTQQGRATNYDSPVPGQSQPNGQSVAVTGAQQPVPVTPKGSQLVAESFFRTPGGPTKPTSSSCMDFEGANKTSLGTLFVPQRKLEVSTEDVH

SEQ ID NO: 282 - DNA, 4908 bp, Homo sapiens
acctgcgtgcagtcggtcctccaggccacgcagcgcccgagagtaccagggagactccggcccctgtcggcgccaagcccctccgcccctcacagcgcccaggtccgcggccgggccttgattttttggcggggaccgtcatggcgtcgcagccaaattcgtctgcgaagaagaaagaggagaaggggaagaacatccaggtggtggtgagatgcagaccatttaatttggcagagcggaaagctagcgcccattcaatagtagaatgtgatcctgtacgaaaagaagttagtgtacgaactggaggattggctgacaagagctcaaggaaaacatacacttttgatatggtgtttggagcatctactaaacagattgatgtttaccgaagtgttgtttgtccaattctggatgaagttattatgggctataattgcactatctttgcgtatggccaaactggcactggaaaaacttttacaatggaaggtgaaaggtcacctaatgaagagtatacctgggaagaggatcccttggctggtataattccacgtacccttcatcaaatttttgagaaacttactgataatggtactgaattttcagtcaaagtgtctctgttggagatctataatgaagagctttttgatcttcttaatccatcatctgatgtttctgagagactacagatgtttgatgatccccgtaacaagagaggagtgataattaaaggtttagaagaaattacagtacacaacaaggatgaagtctatcaaattttagaaaagggggcagcaaaaaggacaactgcagctactctgatgaatgcatactctagtcgttcccactcagttttctctgttacaatacatatgaaagaaactacgattgatggagaagagcttgttaaaatcggaaagttgaacttggttgatcttgcaggaagtgaaaacattggccgttctggagctgttgataagagagctcgggaagctggaaatataaatcaatccctgttgactttgggaagggtcattactgcccttgtagaaagaacacctcatgttccttatcgagaatctaaactaactagaatcctccaggattctcttggagggcgtacaagaacatctataattgcaacaatttctcctgcatctctcaatcttgaggaaactctgagtacattggaatatgctcatagagcaaagaacatattgaataagcctgaagtgaatcagaaactcaccaaaaaagctcttattaaggagtatacggaggagatagaacgtttaaaacgagatcttgctgcagcccgtgagaaaaatggagtgtatatttctgaagaaaattttagagtcatgagtggaaaattaactgttcaagaagagcagattgtagaattgattgaaaaaattggtgctgttgaggaggagctgaatagggttacagagttgtttatggataataaaaatgaacttgaccagtgtaaatctgacctgcaaaataaaacacaagaacttgaaaccactcaaaaacatttgcaagaaactaaattacaacttgttaaagaagaatatatcacatcagctttggaaagtactgaggagaaacttcatgatgctgccagcaagctgcttaacacagttgaagaaactacaaaagatgtatctggtctccattccaaactggatcgtaagaaggcagttgaccaacacaatgcagaagctcaggatatttttggcaaaaacctgaatagtctgtttaataatatggaagaattaattaaggatggcagctcaaagcaaaaggccatgctagaagtacataagaccttatttggtaatctgctgtcttccagtgtctctgcattagataccattactacagtagcacttggatctctcacatctattccagaaaatgtgtctactcatgtttctcagatttttaatatgatactaaaagaacaatcattagcagcagaaagtaaaactgtactacaggaattgattaatgtactcaagactgatcttctaagttcactggaaatgattttatccccaactgtggtgtctatactgaaaatcaatagtcaactaaagcatattttcaagacttcattgacagtggccgataagatagaagatcaaaaaaaggaactagatggctttctcagtatactgtgtaacaatctacatgaactacaagaaaataccatttgttccttggttgagtcacaaaagcaatgtggaaacctaactgaagacctgaagacaataaagcagacccattcccaggaactttgcaagttaatgaatctttggacagagagattctgtgctttggaggaaaagtgtgaaaatatacagaaaccacttagtagtgtccaggaaaatatacagcagaaatctaaggatatagtcaacaaaatgacttttcacagtcaaaaattttgtgctgattctgatggcttctcacaggaactcagaaattttaaccaagaaggtacaaaattggttgaagaatctgtgaaacactctgataaactcaatggcaacctggaaaaaatatctcaagagactgaacagagatgtgaatctctgaacacaagaacagtttatttttctgaacagtgggtatcttccttaaatgaaagggaacaggaacttcacaacttattggaggttgtaagccaatgttgtgaggcttcaagttcagacatcactgagaaatcagatggacgtaaggcagctcatgagaaacagcataacatttttcttgatcagatgactattgatgaagataaattgatagcacaaaatctagaacttaatgaaaccataaaaattggtttgactaagcttaattgctttctggaacaggatctgaaactggatatcccaacaggtacgacaccacagaggaaaagttatttatacccatcaacactggtaagaactgaaccacgtgaacatctccttgatcagctgaaaaggaaacagcctgagctgttaatgatgctaaactgttcagaaaacaacaaagaagagacaattccggatgtggatgtagaagaggcagttctggggcagtatactgaagaacctctaagtcaagagccatctgtagatgctggtgtggattgttcatcaattggcggggttccatttttccagcataaaaaatcacatggaaaagacaaagaaaacagaggcattaacacactggagaggtctaaagtggaagaaactacagagcacttggttacaaagagcagattacctctgcgagcccagatcaacctttaattcacttgggggttggcaattttatttttaaagaaaacttaaaaataaaacctgaaaccccagaacttgagccttgtgtatagattttaaaagaatatatatatcagccgggcgcggtggctcatgcctgtaatcccagcactttgggaggctgaggcgggtggattgcttgagcccaggagtttgagaccagcctggccaacgtggcaaaacctcgtctctgttaaaaattagccgggcgtggtggcacactcctgtaatcccagctactggggaggctgaggcacgagaatcacttgaacccaggaagcggggttgcagtgagccaaaggtacaccactacactccagcctgggcaacagagcaagactcggtctcaaaaacaaaatttaaaaaagatataaggcagtactgtaaattcagttgaattttgatatctacccatttttctgtcatccctatagttcactttgtattaaattgggtttcatttgggatttgcaatgtaaatacgtatttctagttttcatataaagtagttcttttataacaaatgaaaagtatttttcttgtatattattaagtaatgaatatataagaactgtactcttctcagcttgagcttaacataggtaaatatcaccaacatctgtccttagaaaggaccatctcatgttttttttcttgctatgacttgtgtattttcttgcatcctccctagacttccctatttcgctttctcctcggctcactttctccctttttatttttcaccaaaccatttgtagagctacaaaacctatcctttcttattttcagtagtcagaattttatctagaaatcttttaacacctttttagtggttatttctaaaatcactgtcaacaataaatctaaccctagttgtatccctcctttaagtatttaaaacttgttgccccaaatgtgaaagcatttaattcctttaagaggcctaactcattcaccctgacagagttcacaaaaagcccactttagagtatacattgctattatgggagaccacccagacatctgactaatggctctgtgccacactccaagacctgtgccttttagagaagctcacaatgatttaaggactgtttgaaacttccaattatgtctataatttatattcttttgtttacatgatgaaactttttgttgttgcttgtttgtatataatacaatgtgtacatgtatctttttctcgattcaaatcttaacccttaggactctggtatttttgatctggcaaccatatttctggaagttgagatgtttcagcttgaagaaccaaaacagaaggaatatgtacaaagaataaattttctgctcacgatgagtttagtgtgtaaagtttagagacatctgactttgatagctaaattaaaccaaaccctattgaagaattgaatatatgctacttcaagaaactaaattgatctcgtagaattatcttaataaaataatggctataatttctctgcaaaatcagatgtcagcataagcgatggataatacctaataaactgccctcagtaaatccatggttaataaatgtggtttctacatt

SEQ ID NO: 283 - protein, 1056 aa, Homo sapiens
MASQPNSSAKKKEEKGKNIQVVVRCRPFNLAERKASAHSIVECDPVRKEVSVRTGGLADKSSRKTYTFDMVFGASTKQIDVYRSVVCPILDEVIMGYNCTIFAYGQTGTGKTFTMEGERSPNEEYTWEEDPLAGIIPRTLHQIFEKLTDNGTEFSVKVSLLEIYNEELFDLLNPSSDVSERLQMFDDPRNKRGVIIKGLEEITVHNKDEVYQILEKGAAKRTTAATLMNAYSSRSHSVFSVTIHMKETTIDGEELVKIGKLNLVDLAGSENIGRSGAVDKRAREAGNINQSLLTLGRVITALVERTPHVPYRESKLTRILQDSLGGRTRTSIIATISPASLNLEETLSTLEYAHRAKNILNKPEVNQKLTKKALIKEYTEEIERLKRDLAAAREKNGVYISEENFRVMSGKLTVQEEQIVELIEKIGAVEEELNRVTELFMDNKNELDQCKSDLQNKTQELETTQKHLQETKLQLVKEEYITSALESTEEKLHDAASKLLNTVEETTKDVSGLHSKLDRKKAVDQHNAEAQDIFGKNLNSLFNNMEELIKDGSSKQKAMLEVHKTLFGNLLSSSVSALDTITTVALGSLTSIPENVSTHVSQIFNMILKEQSLAAESKTVLQELINVLKTDLLSSLEMILSPTVVSILKINSQLKHIFKTSLTVADKIEDQKKELDGFLSILCNNLHELQENTICSLVESQKQCGNLTEDLKTIKQTHSQELCKLMNLWTERFCALEEKCENIQKPLSSVQENIQQKSKDIVNKMTFHSQKFCADSDGFSQELRNFNQEGTKLVEESVKHSDKLNGNLEKISQETEQRCESLNTRTVYFSEQWVSSLNEREQELHNLLEVVSQCCEASSSDITEKSDGRKAAHEKQHNIFLDQMTIDEDKLIAQNLELNETIKIGLTKLNCFLEQDLKLDIPTGTTPQRKSYLYPSTLVRTEPREHLLDQLKRKQPELLMMLNCSENNKEETIPDVDVEEAVLGQYTEEPLSQEPSVDAGVDCSSIGGVPFFQHKKSHGKDKENRGINTLERSKVEETTEHLVTKSRLPLRAQINL

SEQ ID NO: 284 - DNA, 3668 bp, Homo sapiens
ggcagagggtgggccttaggacgggtctcccttaaactgggcgatcaggcagcgaccctagaggcgtctgtagggtaaagctgggggttctgtagccggaggcggcggcgagtccagaacgtcctggccttacagggagaaggcgtcactcgcggttacaagtgcctgaccctcactccagttggcggaggaggagaaggaaggggccgggccgggtcccctcccctcgcgccccggatggatgtgcccggcccggtgtctcggcgggcggcggcggcggcggccactgtgctcctgcggaccgctcgggtccgtcgcgaatgctggttcttgccgaccgcgctgctctgcgcctacggcttcttcgccagcctcaggccgtccgagcccttcctgaccccgtacctgctggggccggacaagaacctgaccgagagggaggtcttcaatgaaatttatccagtatggacttactcttacctggtgctactgtttcctgtgttccttgccacagactacctccgttataaacctgttgttctactgcaggggctcagccttattgttacatggtttatgctgctctatgcccagggactgctggccattcaatttctagaatttttttatggcatcgccacagccactgaaattgcctattactcttatatctacagtgtggtggacctgggcatgtaccagaaagtcacaagttactgtcgaagtgccactttggtgggctttacagtgggctctgtcctagggcaaatccttgtctcagtggcaggctggtcgctgttcagcctgaatgtcatctctcttacctgtgtttcagtggcttttgctgtggcctggtttttacctatgccacagaagagcctcttctttcaccacattccttctacctgccagagagtgaatggcatcaaggtacaaaatggtggcattgttactgacaccccagcttctaaccaccttcctggctgggaggacattgagtcaaaaatccctctaaatatggaggagcctcccgtggaggaaccggaacccaagccagaccgtctccttgtattgaaagtactatggaatgatttcctgatgtgctactcctctcgccctcttctctgctggtctgtgtggtgggccctctctacctgtggctattttcaagttgtgaactacacacagggcctgtgggagaaagtgatgccttctcgctatgctgctatctataatggtggcgtggaggccgtttcaaccttactgggtgctgttgctgtgtttgcagttggttatataaaaatatcctggtcaacttggggagaaatgacattatctctcttttctctcctgattgctgctgcagtgtatatcatggacactgtgggtaacatttgggtgtgctatgcatcctatgttgtcttcagaatcatctacatgttactcatcacgatagcaacttttcaaattgctgcaaacctcagcatggaacgctatgccctagtatttggtgtaaataccttcattgccctggcactgcagacgctgctcactctaattgtggtagatgccagtggccttggattagaaattaccactcagtttttgatctatgccagttattttgcactcatcgctgtggttttcctggccagtggtgcagtcagtgttatgaagaaatgtagaaagctggaagatccacaatcaagttctcaagtaaccacttcataatatactgctgaagggcttcttcttatagcaagaactctgcacagcaactgcctggatgtatttgattttttaaagcgtagacatatatttatgaatgtgcatttcttgacttcacagcagccacttgactaataccttgtgttccgggaataacatgatactattcagaggagccagaagtaaagtttatttcatggattatttatgagagctaatttaaggatgactttttttctgattcaaaagtgaacttgattttaaaaaccagtcaagagcaatcaaagcagcacatggtgttgtatacttcattagcaagtgagtttggtgttttataggtcacatatgtctgtatctacttagccagatgcttggcctggtgggaccagggctccacagaggccacaaaatgttgcaagtcatgatggatggaaatatgttctaacagcatctgcctctattcaatttaattcttatttctgtgttactcatgtacattggtctttctacatagttattctatcactggcaatatttgttctggtttagtgttctgtattttaaggtgtacgtatcatttctaattttaagttattttaaaaaaattcatcatatgaatgttcttggttcccattgtgacgattatttatttctgtaaaatttgtttagaagtacgtttttgcattattcatatgcttcccagagaagctcatttagttagaaaataaggcaagttttgaagcctgctaaatgaagagacttaagaaagcttaaggtacgcttgcttgtctttaaatcttcaatatgaaggactattaattccaagattaaaagttcatatataggctaaagatgtaactaggccatttgtatttgtattcccttttatttccaaaataaaatgaaaaatctttttttaataatttcatccctatttatagtttttatattaatttgtttttcttatccaagtaaagatgtcaataggaattgcattagtccaaggcctttttcataaactgagcctcttttcaattatttcaatgggacaggaactaggatagatgtgattcctgcatttttttaccttaaatctgcctttgtttctaaaggtagatcatcttgaatatttgcttaaaattgctagtgatttcattaccaagttacttgaaaaaatgttctatatgcatttaattctgaaatcagtctaccaaggggctgctagtatatgtcagacatgaaaactattttaaagctgactttgttgccttatcttgaaaagaatctagataggtgcttttaactggggtattaacttttttagaatgacacagctgaacagtgttaataatagtgtgtcaagattgcaaagtcgacatactcatttggtttaagcaggaatcctagaagcaaatggatggggataagaataggtcattttctattcaccatcctttactattaagggaaaggaaaagaacactagctaaggaagggaaagggaagtgatatcataaaagtagcaaccttcattttacattctgtctgtttttctttttttgctttgttttgtttgtgctaatttgggaattgtgtactccgaaacaagtagaaaagtgctgtttgagggattttattaaatctttttttaatggaatgtggtacaaattgttcatgttaccaaagcaatatttccctggaatttaattcaaagtttgtggcatacaacctgagccttttcttatataagacaagaatatgttcacatcttggtatgtggccatatttatagaatgctgaactcaatgtgcaagttgtactgtatgcagttttgtaaataagtgaaaataatttgttgtactttttattcaattctgtatagattataaaattatttttattaaataaatattttacagtataaaaaaaaaaaaaaaaaa

SEQ ID NO: 285 - protein, 497 aa, Homo sapiens
MDVPGPVSRRAAAAAATVLLRTARVRRECWFLPTALLCAYGFFASLRPSEPFLTPYLLGPDKNLTEREVFNEIYPVWTYSYLVLLFPVFLATDYLRYKPVVLLQGLSLIVTWFMLLYAQGLLAIQFLEFFYGIATATEIAYYSYIYSVVDLGMYQKVTSYCRSATLVGFTVGSVLGQILVSVAGWSLFSLNVISLTCVSVAFAVAWFLPMPQKSLFFHHIPSTCQRVNGIKVQNGGIVTDTPASNHLPGWEDIESKIPLNMEEPPVEEPEPKPDRLLVLKVLWNDFLMCYSSRPLLCWSVWWALSTCGYFQVVNYTQGLWEKVMPSRYAAIYNGGVEAVSTLLGAVAVFAVGYIKISWSTWGEMTLSLFSLLIAAAVYIMDTVGNIWVCYASYVVFRIIYMLLITIATFQIAANLSMERYALVFGVNTFIALALQTLLTLIVVDASGLGLEITTQFLIYASYFALIAVVFLASGAVSVMKKCRKLEDPQSSSQVTTS

SEQ ID NO: 286 - DNA, 1912 bp, Homo sapiens
ttttttttcttccctctagtgggcggggcagaggagttagccaagatgtgactttgaaaccctcagcgtctcagtgcccttttgttctaaacaaagaattttgtaattggttctaccaaagaaggatataatgaagtcactatgggaaaagatggggaggagagttgtaggattctacattaattctcttgtgcccttagcccactacttcagaatttcctgaagaaagcaagcctgaattggttttttaaattgctttaaaaattttttttaactgggttaatgcttgctgaattggaagtgaatgtccattcctttgcctcttttgcagatatacacttcagataactacaccgaggaaatgggctcaggggactatgactccatgaaggaaccctgtttccgtgaagaaaatgctaatttcaataaaatcttcctgcccaccatctactccatcatcttcttaactggcattgtgggcaatggattggtcatcctggtcatgggttaccagaagaaactgagaagcatgacggacaagtacaggctgcacctgtcagtggccgacctcctctttgtcatcacgcttcccttctgggcagttgatgccgtggcaaactggtactttgggaacttcctatgcaaggcagtccatgtcatctacacagtcaacctctacagcagtgtcctcatcctggccttcatcagtctggaccgctacctggccatcgtccacgccaccaacagtcagaggccaaggaagctgttggctgaaaaggtggtctatgttggcgtctggatccctgccctcctgctgactattcccgacttcatctttgccaacgtcagtgaggcagatgacagatatatctgtgaccgcttctaccccaatgacttgtgggtggttgtgttccagtttcagcacatcatggttggccttatcctgcctggtattgtcatcctgtcctgctattgcattatcatctccaagctgtcacactccaagggccaccagaagcgcaaggccctcaagaccacagtcatcctcatcctggctttcttcgcctgttggctgccttactacattgggatcagcatcgactccttcatcctcctggaaatcatcaagcaagggtgtgagtttgagaacactgtgcacaagtggatttccatcaccgaggccctagctttcttccactgttgtctgaaccccatcctctatgctttccttggagccaaatttaaaacctctgcccagcacgcactcacctctgtgagcagagggtccagcctcaagatcctctccaaaggaaagcgaggtggacattcatctgtttccactgagtctgagtcttcaagttttcactccagctaacacagatgtaaaagacttttttttatacgataaataacttttttttaagttacacatttttcagatataaaagactgaccaatattgtacagtttttattgcttgttggatttttgtcttgtgtttctttagtttttgtgaagtttaattgacttatttatataaattttttttgtttcatattgatgtgtgtctaggcaggacctgtggccaagttcttagttgctgtatgtctcgtggtaggactgtagaaaagggaactgaacattccagagcgtgtagtgaatcacgtaaagctagaaatgatccccagctgtttatgcatagataatctctccattcccgtggaacgtttttcctgttcttaagacgtgattttgctgtagaagatggcacttataaccaaagcccaaagtggtatagaaatgctggtttttcagttttcaggagtgggttgatttcagcacctacagtgtacagtcttgtattaagttgttaataaaagtacatgttaaacttaaaaaaaaaaaaaaaaaa

SEQ ID NO: 287 - protein, 356 aa, Homo sapiens
MSIPLPLLQIYTSDNYTEEMGSGDYDSMKEPCFREENANFNKIFLPTIYSIIFLTGIVGNGLVILVMGYQKKLRSMTDKYRLHLSVADLLFVITLPFWAVDAVANWYFGNFLCKAVHVIYTVNLYSSVLILAFISLDRYLAIVHATNSQRPRKLLAEKVVYVGVWIPALLLTIPDFIFANVSEADDRYICDRFYPNDLWVVVFQFQHIMVGLILPGIVILSCYCIIISKLSHSKGHQKRKALKTTVILILAFFACWLPYYIGISIDSFILLEIIKQGCEFENTVHKWISITEALAFFHCCLNPILYAFLGAKFKTSAQHALTSVSRGSSLKILSKGKRGGHSSVSTESESSSFHSS

SEQ ID NO: 288 - DNA, 1691 bp, Homo sapiens
aacttcagtttgttggctgcggcagcaggtagcaaagtgacgccgagggcctgagtgctccagtagccaccgcatctggagaaccagcggttaccatggaggggatcagtatatacacttcagataactacaccgaggaaatgggctcaggggactatgactccatgaaggaaccctgtttccgtgaagaaaatgctaatttcaataaaatcttcctgcccaccatctactccatcatcttcttaactggcattgtgggcaatggattggtcatcctggtcatgggttaccagaagaaactgagaagcatgacggacaagtacaggctgcacctgtcagtggccgacctcctctttgtcatcacgcttcccttctgggcagttgatgccgtggcaaactggtactttgggaacttcctatgcaaggcagtccatgtcatctacacagtcaacctctacagcagtgtcctcatcctggccttcatcagtctggaccgctacctggccatcgtccacgccaccaacagtcagaggccaaggaagctgttggctgaaaaggtggtctatgttggcgtctggatccctgccctcctgctgactattcccgacttcatctttgccaacgtcagtgaggcagatgacagatatatctgtgaccgcttctaccccaatgacttgtgggtggttgtgttccagtttcagcacatcatggttggccttatcctgcctggtattgtcatcctgtcctgctattgcattatcatctccaagctgtcacactccaagggccaccagaagcgcaaggccctcaagaccacagtcatcctcatcctggctttcttcgcctgttggctgccttactacattgggatcagcatcgactccttcatcctcctggaaatcatcaagcaagggtgtgagtttgagaacactgtgcacaagtggatttccatcaccgaggccctagctttcttccactgttgtctgaaccccatcctctatgctttccttggagccaaatttaaaacctctgcccagcacgcactcacctctgtgagcagagggtccagcctcaagatcctctccaaaggaaagcgaggtggacattcatctgtttccactgagtctgagtcttcaagttttcactccagctaacacagatgtaaaagacttttttttatacgataaataacttttttttaagttacacatttttcagatataaaagactgaccaatattgtacagtttttattgcttgttggatttttgtcttgtgtttctttagtttttgtgaagtttaattgacttatttatataaattttttttgtttcatattgatgtgtgtctaggcaggacctgtggccaagttcttagttgctgtatgtctcgtggtaggactgtagaaaagggaactgaacattccagagcgtgtagtgaatcacgtaaagctagaaatgatccccagctgtttatgcatagataatctctccattcccgtggaacgtttttcctgttcttaagacgtgattttgctgtagaagatggcacttataaccaaagcccaaagtggtatagaaatgctggtttttcagttttcaggagtgggttgatttcagcacctacagtgtacagtcttgtattaagttgttaataaaagtacatgttaaacttaaaaaaaaaaaaaaaaaa

SEQ ID NO: 289 - protein, 352 aa, Homo sapiens
MEGISIYTSDNYTEEMGSGDYDSMKEPCFREENANFNKIFLPTIYSIIFLTGIVGNGLVILVMGYQKKLRSMTDKYRLHLSVADLLFVITLPFWAVDAVANWYFGNFLCKAVHVIYTVNLYSSVLILAFISLDRYLAIVHATNSQRPRKLLAEKVVYVGVWIPALLLTIPDFIFANVSEADDRYICDRFYPNDLWVVVFQFQHIMVGLILPGIVILSCYCIIISKLSHSKGHQKRKALKTTVILILAFFACWLPYYIGISIDSFILLEIIKQGCEFENTVHKWISITEALAFFHCCLNPILYAFLGAKFKTSAQHALTSVSRGSSLKILSKGKRGGHSSVSTESESSSFHSS

SEQ ID NO: 290 - DNA, 2210 bp, Homo sapiens
agccgcggcctcaactaaaagtggccattgacctttcaagctttcgagcagtgatgcaatagaatagtatttcaaagaaaaatgcttatcgaaattttggatccggttttcccgtgattgttaagggtttcttttaaaaagtaggtcacatttcaagtaggtcatatttcgggggcgggtgcgcagacaaggagatgagtttccactaaggccagggggcctccaacggggttggaggtgagaatcccaggtagggtagaggtgccgagatccttccgaatcccagccctggggcgtcagccctgcagggaatggcagagacactctccggactgagggaaccgaggccagtcaccaagccccttccgggcgcgcaggcgatcagtgggtgaccgcggctgcgagggactttgtcatccgtcctccaggatctggggagaaagagccccatcccttctctctctgccaccatttcggacaccccgcagggactcgttttgggattcgcactgacttcaaggaaggacgcgaacccttctctgaccccagctcgggcggccacctgtctttgccgcggtgacccttctctcatgaccctgcggtgccttgagccctccgggaatggcggggaagggacgcggagccagtgggggaccgcggggtcggcggaggagccatccccgcaggcggcgcgtctggcgaaggccctgcgggagctcggtcagacaggatggtactggggaagtatgactgttaatgaagccaaagagaaattaaaagaggcaccagaaggaactttcttgattagagatagctcgcattcagactacctactaacaatatctgttaaaacatcagctggaccaactaatcttcgaatcgaataccaagacggaaaattcagattggactctatcatatgtgtcaaatccaagcttaaacaatttgacagtgtggttcatctgatcgactactatgttcagatgtgcaaggataagcggacaggtccagaagccccccggaacggcactgttcacctttatctgaccaaaccgctctacacgtcagcaccatctctgcagcatctctgtaggctcaccattaacaaatgtaccggtgccatctggggactgcctttaccaacaagactaaaagattacttggaagaatataaattccaggtataaatgtttctctttttttaaacatgtctcacatagagtatctccgaatgcagctatgtaaaagagaaccaaaacttgagtgctctggataactatatggaatgctttctaagaacagctgaagctaatctaatttaaatttaacagcttgaagaggtagctaggtgtttaaagttcctccagatacttttacctgagtgatgcttcccttcctaaggctgaccaagacctgttgatccttttagattaaaaataaaatgtcgcatgtaaaggctgaagtcgcgttttatcagaatgccttgccttcttaggttcttttccattatgtcaaaggtccaggctccagtaggagagaaagaactcctcataggaatactgaagaagtgggaaggaaccaagctgacacaggcctcactgcaatttgatatgcctgctgatcagagtctcttgggcattttatattttgcattctgatgtacctaggagttttgttaaacagatgatgtatgtgagtatttatcccattttatgcaattaaccaaatcaaccaaaaaaagtgaccatgaagtcctgtatttgtctttttactacatgtaggaactctcatgtgaatgagtactgtagtaatccattctatgggagccttatttcagaaatatttcaaactggtgcaaatggaaaagactttctcttttcctttaaagctaaagacaagaatatcatgctatacaggtgcaactcaatccccgttaataaaaaccaatgtaggtataggcattctaccctttgaaatagctgtgtcccaacctgttgccattgattttttggaaatggctttagaaatatccaagttgtccttgaattgtctaaccatggacataaacagttgtctcccttctactgtgtagaatactttgacttaattttcttccagatacagggggatacctgcctgtttttcaaagtgtttatttactgctgttactatttgattagaatgtattaaataaaaaaaacctgatttct

SEQ ID NO: 291 - protein, 198 aa, Homo sapiens
MTLRCLEPSGNGGEGTRSQWGTAGSAEEPSPQAARLAKALRELGQTGWYWGSMTVNEAKEKLKEAPEGTFLIRDSSHSDYLLTISVKTSAGPTNLRIEYQDGKFRLDSIICVKSKLKQFDSVVHLIDYYVQMCKDKRTGPEAPRNGTVHLYLTKPLYTSAPSLQHLCRLTINKCTGAIWGLPLPTRLKDYLEEYKFQV

SEQ ID NO: 292 - DNA, 2082 bp, Homo sapiens
cttggctggaacctgagacggattcgctcccaaatgatgctccagtggctggagcaactcaagttcatcattgtcctgagagagaggagcagcgcggttctcggccgggacagcagaacgccaggggaccctcacctgggcgcgccggggcacgggctttgattgtcctggggtcgcggagacccgcgcgcctgccctgcacgccgggcggcaacctttgcagtcgcgttggctgctgcgatcggccggcgggtccctgccgaaggctcggctgcttctgtccacctcttacacttcttcatttatcggtggatcatttcgagagtccgtcttgtaaatgtttggcactttgctactttattgcttctttctggcgacagttccagcactcgccgagaccggcggagaaaggcagctgagcccggagaagagcgaaatatggggacccgggctaaaagcagacgtcgtccttcccgcccgctatttctatattcaggcagtggatacatcagggaataaattcacatcttctccaggcgaaaaggtcttccaggtgaaagtctcagcaccagaggagcaattcactagagttggagtccaggttttagaccgaaaagatgggtccttcatagtaagatacagaatgtatgcaagctacaaaaatctgaaggtggaagttaaattccaagggcaacatgtggccaaatccccatatattttaaaagggccggtttaccatgagaactgtgactgtcctctgcaagatagtgcagcctggctacgggagatgaactgccctgaaaccattgctcagattcagagagatctggcacatttccctgctgtggatccagaaaagattgcagtagaaatcccaaaaagatttggacagaggcagagcctatgtcactacaccttaaaggataacaaggtttatatcaagactcatggtgaacatgtaggttttagaattttcatggatgccatactactttctttgactagaaaggtgaagatgccagatgtggagctctttgttaatttgggagactggcctttggaaaaaaagaaatccaattcaaacatccatccgatcttttcctggtgtggctccacagattccaaggatatcgtgatgcctacgtacgatttgactgattctgttctggaaaccatgggccgggtaagtctggatatgatgtccgtgcaagctaacacgggtcctccctgggaaagcaaaaattccactgccgtctggagagggcgagacagccgcaaagagagactcgagctggttaaactcagtagaaaacacccagaactcatagacgctgctttcaccaactttttcttctttaaacacgatgaaaacctgtatggtcccattgtgaaacatatttcattttttgatttcttcaagcataagtatcaaataaatatcgatggcactgtagcagcttatcgcctgccatatttgctagttggtgacagtgttgtgctgaagcaggattccatctactatgaacatttttacaatgagctgcagccctggaaacactacattccagttaagagcaacctgagcgatctgctagaaaaacttaaatgggcgaaagatcacgatgaagaggccaaaaagatagcaaaagcaggacaagaatttgcaagaaataatctcatgggcgatgacatattctgttattatttcaaacttttccaggaatatgccaatttacaagtgagtgagccccaaatccgagagggcatgaaaagggtagaaccacagactgaggacgacctcttcccttgtacttgccataggaaaaagaccaaagatgaactctgatatgcaaaataacttctattagaataatggtgctctgaagactcttcttaactaaaaagaagaatttttttaagtattaattccatggacaatataaaatctgtgtgattgtttgcagtatgaagacacatttctacttatgcagtattctcatgactgtactttaaagtacatttttagaattttataataaaaccacctttattttaaaggaaaaaaaaaaaaaaaaaaaaaaa

SEQ ID NO: 293 - protein, 502 aa, Homo sapiens
MFGTLLLYCFFLATVPALAETGGERQLSPEKSEIWGPGLKADVVLPARYFYIQAVDTSGNKFTSSPGEKVFQVKVSAPEEQFTRVGVQVLDRKDGSFIVRYRMYASYKNLKVEVKFQGQHVAKSPYILKGPVYHENCDCPLQDSAAWLREMNCPETIAQIQRDLAHFPAVDPEKIAVEIPKRFGQRQSLCHYTLKDNKVYIKTHGEHVGFRIFMDAILLSLTRKVKMPDVELFVNLGDWPLEKKKSNSNIHPIFSWCGSTDSKDIVMPTYDLTDSVLETMGRVSLDMMSVQANTGPPWESKNSTAVWRGRDSRKERLELVKLSRKHPELIDAAFTNFFFFKHDENLYGPIVKHISFFDFFKHKYQINIDGTVAAYRLPYLLVGDSVVLKQDSIYYEHFYNELQPWKHYIPVKSNLSDLLEKLKWAKDHDEEAKKIAKAGQEFARNNLMGDDIFCYYFKLFQEYANLQVSEPQIREGMKRVEPQTEDDLFPCTCHRKKTKDEL

SEQ ID NO: 294 - DNA, 2100 bp, Homo sapiens
ccagaggtagggaaggaaacaatcccgacccggagtggacaggtgaggaggggaggacttgcctcgccgaggccgctgcgaggagcgtgcccaagggcgaaggtccagggaacccggctcccgcgcaccgaagacggccgccatgccggcccgttgtgtggccgcccactgcggcaacaccaccaagtctgggaagtcgctgttccgctttcccaaggaccgggccgtgcggctgctctgggaccgcttcgtgcggggttgccgcgccgactggtacggaggcaatgaccgctcggtcatctgctctgaccactttgccccagcctgttttgacgtctcttcggttatccagaagaacctgcgcttctcccagcgcctgaggctggtggcaggcgccgtgcccaccctgcaccgggtgcccgccccggcacctaagaggggagaggagggagaccaagcaggccgcctggacacgcgaggagagctccaggcagccaggcattctgaggctgccccaggtccagtctcctgtacacgcccccgagctgggaagcaggctgcagcttcacagattacgtgtgaaaatgaacttgtgcaaacccaaccccatgctgataatccatctaatactgtcacttcagtacctactcactgtgaagaaggcccagtgcataaaagtacacaaatttctttgaaaaggccccgtcaccgtagtgtgggtattcaagccaaagtgaaagcgtttggaaaaagactgtgtaatgcaactactcagacagaggaattgtggtctagaacttcctctctctttgacatttactccagtgattcagaaacagatacagactgggatatcaagagtgaacagagtgatttgtcttatatggctgtacaggtgaaagaagaaacatgttaaaaactcaacatcaaatgctctgatgtgctatagattttcaaatctttactcacataattatctctttgctattgtaaatctttcacttcaagataatttgacagttgagtatcagcataatttgtttagctctaaggcaaaagtttgcttgcttgccaacacaatgaagataatacctacccacaaacatccctattctctactttcacctttttttttcttttaatccttttggtagaaatcaggttacaaagcaaaaccacaatatcagcaacacttcctaatcaaaattaagcattgaatatttgtttaagcttagttcagaagcaacgctcctacaggacttgacatttgctagttagaatatccctactcttctaaataatttgaaagtatagagcagtaacacagtaacagtgagcacagccaagcctgacactactaaatgatttggtagtgaagccaggacatctacccttgactattttttatgttatttatttattagtttgtccatttgtaacatgtatagatctgtcctgtgagcatttctgatgaatctatggttcttacagaaatttttcaaaggaatcaatttagagatagagttttcatatacttacattaacttattaatgaaatctgtttgcatcagtgcttactgtgacacattaattagcttgattaatttagattagaatcattaacatcatgaaaaataaaagtactacatttctaacgtattcccattgcaggtgttaggtattttttctgtcaacacctctcttttgaattctacatttgagaaataagcatggaaatattagctgccccgtctgccattcaccaggaaaaatttctatggcaattttgtaccatgaagtaaactgttacaatagtttctgagaagcatactataactctgatcttccattgagaataacaaaaataaatatcaattttacacctcatatgtcttcttagttctgaatgattagaagaacttgcatgtatttttatcctagaaggtttaaataatacatcaaagttattttcttccaaatgtaattttatgtctgctttaaggaaaataaaataaaatattaataggaaaaaaaaaaaaaaaaaaaaaaaaaaaaaaaaaaaaaaaaaaaaaaaaaaaaaaaaaaaaaaaaaaaaaaaaa

SEQ ID NO: 295 - protein, 257 aa, Homo sapiens
MPARCVAAHCGNTTKSGKSLFRFPKDRAVRLLWDRFVRGCRADWYGGNDRSVICSDHFAPACFDVSSVIQKNLRFSQRLRLVAGAVPTLHRVPAPAPKRGEEGDQAGRLDTRGELQAARHSEAAPGPVSCTRPRAGKQAAASQITCENELVQTQPHADNPSNTVTSVPTHCEEGPVHKSTQISLKRPRHRSVGIQAKVKAFGKRLCNATTQTEELWSRTSSLFDIYSSDSETDTDWDIKSEQSDLSYMAVQVKEETC

SEQ ID NO: 296 - DNA, 1647 bp, Homo sapiens
gcctgagaccctcctgcagccttctcaagggacagccccactctgcctcttgctcctccagggcagcaccatgcagcccctgtggctctgctgggcactctgggtgttgcccctggccagccccggggccgccctgaccggggagcagctcctgggcagcctgctgcggcagctgcagctcaaagaggtgcccaccctggacagggccgacatggaggagctggtcatccccacccacgtgagggcccagtacgtggccctgctgcagcgcagccacggggaccgctcccgcggaaagaggttcagccagagcttccgagaggtggccggcaggttcctggcgttggaggccagcacacacctgctggtgttcggcatggagcagcggctgccgcccaacagcgagctggtgcaggccgtgctgcggctcttccaggagccggtccccaaggccgcgctgcacaggcacgggcggctgtccccgcgcagcgcccgggcccgggtgaccgtcgagtggctgcgcgtccgcgacgacggctccaaccgcacctccctcatcgactccaggctggtgtccgtccacgagagcggctggaaggccttcgacgtgaccgaggccgtgaacttctggcagcagctgagccggccccggcagccgctgctgctacaggtgtcggtgcagagggagcatctgggcccgctggcgtccggcgcccacaagctggtccgctttgcctcgcagggggcgccagccgggcttggggagccccagctggagctgcacaccctggaccttggggactatggagctcagggcgactgtgaccctgaagcaccaatgaccgagggcacccgctgctgccgccaggagatgtacattgacctgcaggggatgaagtgggccgagaactgggtgctggagcccccgggcttcctggcttatgagtgtgtgggcacctgccggcagcccccggaggccctggccttcaagtggccgtttctggggcctcgacagtgcatcgcctcggagactgactcgctgcccatgatcgtcagcatcaaggagggaggcaggaccaggccccaggtggtcagcctgcccaacatgagggtgcagaagtgcagctgtgcctcggatggtgcgctcgtgccaaggaggctccagccataggcgcctagtgtagccatcgagggacttgacttgtgtgtgtttctgaagtgttcgagggtaccaggagagctggcgatgactgaactgctgatggacaaatgctctgtgctctctagtgagccctgaatttgcttcctctgacaagttacctcacctaatttttgcttctcaggaatgagaatctttggccactggagagcccttgctcagttttctctattcttattattcactgcactatattctaagcacttacatgtggagatactgtaacctgagggcagaaagcccaatgtgtcattgtttacttgtcctgtcactggatctgggctaaagtcctccaccaccactctggacctaagacctggggttaagtgtgggttgtgcatccccaatccagataataaagactttgtaaaacatgaataaaacacattttattctaaaaaaaaaaaaaaaaaaaaaaaaaaaaaaaa

SEQ ID NO: 297 - protein, 366 aa, Homo sapiens
MQPLWLCWALWVLPLASPGAALTGEQLLGSLLRQLQLKEVPTLDRADMEELVIPTHVRAQYVALLQRSHGDRSRGKRFSQSFREVAGRFLALEASTHLLVFGMEQRLPPNSELVQAVLRLFQEPVPKAALHRHGRLSPRSARARVTVEWLRVRDDGSNRTSLIDSRLVSVHESGWKAFDVTEAVNFWQQLSRPRQPLLLQVSVQREHLGPLASGAHKLVRFASQGAPAGLGEPQLELHTLDLGDYGAQGDCDPEAPMTEGTRCCRQEMYIDLQGMKWAENWVLEPPGFLAYECVGTCRQPPEALAFKWPFLGPRQCIASETDSLPMIVSIKEGGRTRPQVVSLPNMRVQKCSCASDGALVPRRLQP

SEQ ID NO: 298 - DNA, 2279 bp, Homo sapiens
aggtggagccttttttgctcacggcagcaagttcccttctcctttctctcccccggcggcgtgtgcattggctcttcaagctgcctgtgctgctccgtggagtgaaaaaggcagggtgtgctcgcagactgtgctataaactgcaatttctatttggggtcctcacggagaagaacaccaggaaagacagacaggaccagtgccatgggccagctttgctgctttcctttctcaagagatgaaggaaaaatcagtgaaaagaacggaggggagcccgatgacgctgaactagtaaggctcagtaagaggctggtggagaacgcggtgctcaaggctgtccagcagtatctggaggaaacacagaataaaaacaagccgggggaggggagctctgtgaaaaccgaagcagctgatcagaatggcaatgacaatgagaacaacaggaaatgagcccggaacgcaggcccccatgtctctgtgcaaagcctccctgcttccctctgctgagtctagggactgacttgcagcgtgctgtttaagttaagtttctctggtgcaatctgtgaagattgcctaatacttttcatgatcgatgtgttcgcattgctgaaacacaacagaagaaaaatggagtgctgggactggcagaggaaattaattgatgaaagaagaatggcccaagtttcattcgccctcagccacgcacaagggaaagggaactttgggttatgcctcctggacgcaaattaaaggccgagaaagaggccttgccatcaatggaatactgccatttatattgcttagcagggcatttgactactttatctgaggccagaactctcacacacagctatcaagtgctaagtttaaaataatcactgttggaattgtcatctgtacaattagtccataatgtttcatgtttgtcctaagtgtgctgttgctatgcagtgtgatctttatttatagtaaattatgtttcatgtaaatgatatatttttggtgaaatgcaaccttttctataaaatgtgggcaacattttaaagtttttttaaaatcctattttgataagtcagtatgccatatttaatgaaatgttattatataatttttttttcttaggcaagaaacctattggaattcgagacttaattaatgaagctttgcatcgagaaacgatgggtctgaagtccaaagtgaaacagataaaggaacttttattaaagcctgagactcaggccagaattaggagggagctttttgaaggaagacttattaacaacagtaattcagcaaatgacgttgatttcagcacaactttgacataagctctacattgcgattgtgacaacatagcttatgaaatcttttcagcttattaagtagctctttggtaaacaccaaagaagtttctgatagtgtctgcacaacagcaaaccaacatttggtgaggaattagcaatttcttgccaaagaaaattgattctgcccaattattttttgagctacacttgtgttttagaatatctgtttctgtaatattgagagttattttatagaaatgatttcttaattagctgttgtgagatatttctcgggtccttgcagaaaaaaacatacagactgtgaacaaatcattcacaaacagaataaaacagagccaacaacagtattttaagggtcacttgcctcctgttgacacaattgttgctaaatcaaaagaagcgttgtccaggtgtgtctacatctagtgttacttttaatgagaatttgaatgtttattgaacaatagtacttgaatgaacatttataaatgtaattattgcgatcactggttaagaatgttttatatatccttataatatttttcactgatcaaaatgttgttctgctttttcatttcttaaggaatacatgtttgggatttttattttttacgtgtccgaagataagctccaggtcttatcgtatcccttgccatctgaacttgtttgcactgcttctgtttgaaagagcatcttgaaaaacttccccggtatgatgattgttggtaacaactttttctatagtcattgatggagtagatcatgatggaggggaaatcactggagatcaaatatgtaaaatcatttcaaatataaaatccagtttactcatggattttagctattttttcactgggtaaattatactacatttatttacaaatgagtttatgcattttcatggctcttaataaacatattgttttcccttgaaaaaaaaaaaaaaaaaaaaaa

SEQ ID NO: 299 - protein, 81 aa, Homo sapiens
MGQLCCFPFSRDEGKISEKNGGEPDDAELVRLSKRLVENAVLKAVQQYLEETQNKNKPGEGSSVKTEAADQNGNDNENNRK

SEQ ID NO: 300 - DNA, 2821 bp, Homo sapiens
gaaaaaagaaaatgtcagaggaatttgaagccaatactatggattctctggtagacatgccatttgctactgtagatattcaggatgactgtggaatcactgatgaacctcaaataaatttgaagagaagtcaagaaaatgaatgggtcaagagtgatcaagtaaagaagaggaaaaaaaagagaaaagattatcaacccaactatttcctgtccattccaatcaccaacaaagagattataaaaggaattaagatcctgcagaatgcaataatacaacaagatgagcgactggccaaagcaatggtcagtgatggttcctttcatattaccctgctggtgatgcaattattaaatgaagatgaagtaaacattggtattgatgctcttttggaattgaaaccattcatagaagaactcctccagggaaaacatttgactttgccctttcaagggattggtacttttggaaatcaggttggatttgtgaagctggcagaaggagatcatgtaaactcacttttggagatagcagagactgcaaataggacatttcaagaaaaaggcatcctggtaggagagagcagaagttttaaacctcatttgaccttcatgaagttgtcaaaatcaccgtggctccgtaagaatggagtgaaaaaaatagatcctgatttatatgaaaagtttatcagtcacagatttggagaagaaatattatatcgcatagatctttgctccatgctgaagaaaaaacaaagtaatggttattatcactgtgaatcttccattgtgattggtgaaaagaacggaggggagcccgatgacgctgaactagtaaggctcagtaagaggctggtggagaacgcggtgctcaaggctgtccagcagtatctggaggaaacacagaataaaaacaagccgggggaggggagctctgtgaaaaccgaagcagctgatcagaatggcaatgacaatgagaacaacaggaaatgagcccggaacgcaggcccccatgtctctgtgcaaagcctccctgcttccctctgctgagtctagggactgacttgcagcgtgctgtttaagttaagtttctctggtgcaatctgtgaagattgcctaatacttttcatgatcgatgtgttcgcattgctgaaacacaacagaagaaaaatggagtgctgggactggcagaggaaattaattgatgaaagaagaatggcccaagtttcattcgccctcagccacgcacaagggaaagggaactttgggttatgcctcctggacgcaaattaaaggccgagaaagaggccttgccatcaatggaatactgccatttatattgcttagcagggcatttgactactttatctgaggccagaactctcacacacagctatcaagtgctaagtttaaaataatcactgttggaattgtcatctgtacaattagtccataatgtttcatgtttgtcctaagtgtgctgttgctatgcagtgtgatctttatttatagtaaattatgtttcatgtaaatgatatatttttggtgaaatgcaaccttttctataaaatgtgggcaacattttaaagtttttttaaaatcctattttgataagtcagtatgccatatttaatgaaatgttattatataatttttttttcttaggcaagaaacctattggaattcgagacttaattaatgaagctttgcatcgagaaacgatgggtctgaagtccaaagtgaaacagataaaggaacttttattaaagcctgagactcaggccagaattaggagggagctttttgaaggaagacttattaacaacagtaattcagcaaatgacgttgatttcagcacaactttgacataagctctacattgcgattgtgacaacatagcttatgaaatcttttcagcttattaagtagctctttggtaaacaccaaagaagtttctgatagtgtctgcacaacagcaaaccaacatttggtgaggaattagcaatttcttgccaaagaaaattgattctgcccaattattttttgagctacacttgtgttttagaatatctgtttctgtaatattgagagttattttatagaaatgatttcttaattagctgttgtgagatatttctcgggtccttgcagaaaaaaacatacagactgtgaacaaatcattcacaaacagaataaaacagagccaacaacagtattttaagggtcacttgcctcctgttgacacaattgttgctaaatcaaaagaagcgttgtccaggtgtgtctacatctagtgttacttttaatgagaatttgaatgtttattgaacaatagtacttgaatgaacatttataaatgtaattattgcgatcactggttaagaatgttttatatatccttataatatttttcactgatcaaaatgttgttctgctttttcatttcttaaggaatacatgtttgggatttttattttttacgtgtccgaagataagctccaggtcttatcgtatcccttgccatctgaacttgtttgcactgcttctgtttgaaagagcatcttgaaaaacttccccggtatgatgattgttggtaacaactttttctatagtcattgatggagtagatcatgatggaggggaaatcactggagatcaaatatgtaaaatcatttcaaatataaaatccagtttactcatggattttagctattttttcactgggtaaattatactacatttatttacaaatgagtttatgcattttcatggctcttaataaacatattgttttcccttgaaaaaaaaaaaaaaaaaaaaaa

SEQ ID NO: 301 - protein, 326 aa, Homo sapiens
MSEEFEANTMDSLVDMPFATVDIQDDCGITDEPQINLKRSQENEWVKSDQVKKRKKKRKDYQPNYFLSIPITNKEIIKGIKILQNAIIQQDERLAKAMVSDGSFHITLLVMQLLNEDEVNIGIDALLELKPFIEELLQGKHLTLPFQGIGTFGNQVGFVKLAEGDHVNSLLEIAETANRTFQEKGILVGESRSFKPHLTFMKLSKSPWLRKNGVKKIDPDLYEKFISHRFGEEILYRIDLCSMLKKKQSNGYYHCESSIVIGEKNGGEPDDAELVRLSKRLVENAVLKAVQQYLEETQNKNKPGEGSSVKTEAADQNGNDNENNRK

SEQ ID NO: 302 - DNA, 2348 bp, Homo sapiens
aggtggagccttttttgctcacggcagcaagttcccttctcctttctctcccccggcggcgtgtgcattggctcttcaagctgcctgtgctgctccgtggagtgaaaaaggcagggtgtgctcgcagactgtgctataaactgcaatttctatttggggtcctcacggagaagaacaccaggaaagacagacaggaccagtgccatgggccagctttgctgctttcctttctcaagagatgaaggaaaaatcagtgagttggaaagctcgtcctctgcagtcctacagagatacagcaaggatatacccagttggtcaagtggtgaaaagaacggaggggagcccgatgacgctgaactagtaaggctcagtaagaggctggtggagaacgcggtgctcaaggctgtccagcagtatctggaggaaacacagaataaaaacaagccgggggaggggagctctgtgaaaaccgaagcagctgatcagaatggcaatgacaatgagaacaacaggaaatgagcccggaacgcaggcccccatgtctctgtgcaaagcctccctgcttccctctgctgagtctagggactgacttgcagcgtgctgtttaagttaagtttctctggtgcaatctgtgaagattgcctaatacttttcatgatcgatgtgttcgcattgctgaaacacaacagaagaaaaatggagtgctgggactggcagaggaaattaattgatgaaagaagaatggcccaagtttcattcgccctcagccacgcacaagggaaagggaactttgggttatgcctcctggacgcaaattaaaggccgagaaagaggccttgccatcaatggaatactgccatttatattgcttagcagggcatttgactactttatctgaggccagaactctcacacacagctatcaagtgctaagtttaaaataatcactgttggaattgtcatctgtacaattagtccataatgtttcatgtttgtcctaagtgtgctgttgctatgcagtgtgatctttatttatagtaaattatgtttcatgtaaatgatatatttttggtgaaatgcaaccttttctataaaatgtgggcaacattttaaagtttttttaaaatcctattttgataagtcagtatgccatatttaatgaaatgttattatataatttttttttcttaggcaagaaacctattggaattcgagacttaattaatgaagctttgcatcgagaaacgatgggtctgaagtccaaagtgaaacagataaaggaacttttattaaagcctgagactcaggccagaattaggagggagctttttgaaggaagacttattaacaacagtaattcagcaaatgacgttgatttcagcacaactttgacataagctctacattgcgattgtgacaacatagcttatgaaatcttttcagcttattaagtagctctttggtaaacaccaaagaagtttctgatagtgtctgcacaacagcaaaccaacatttggtgaggaattagcaatttcttgccaaagaaaattgattctgcccaattattttttgagctacacttgtgttttagaatatctgtttctgtaatattgagagttattttatagaaatgatttcttaattagctgttgtgagatatttctcgggtccttgcagaaaaaaacatacagactgtgaacaaatcattcacaaacagaataaaacagagccaacaacagtattttaagggtcacttgcctcctgttgacacaattgttgctaaatcaaaagaagcgttgtccaggtgtgtctacatctagtgttacttttaatgagaatttgaatgtttattgaacaatagtacttgaatgaacatttataaatgtaattattgcgatcactggttaagaatgttttatatatccttataatatttttcactgatcaaaatgttgttctgctttttcatttcttaaggaatacatgtttgggatttttattttttacgtgtccgaagataagctccaggtcttatcgtatcccttgccatctgaacttgtttgcactgcttctgtttgaaagagcatcttgaaaaacttccccggtatgatgattgttggtaacaactttttctatagtcattgatggagtagatcatgatggaggggaaatcactggagatcaaatatgtaaaatcatttcaaatataaaatccagtttactcatggattttagctattttttcactgggtaaattatactacatttatttacaaatgagtttatgcattttcatggctcttaataaacatattgttttcccttgaaaaaaaaaaaaaaaaaaaaaa

SEQ ID NO: 303 - protein, 104 aa, Homo sapiens
MGQLCCFPFSRDEGKISELESSSSAVLQRYSKDIPSWSSGEKNGGEPDDAELVRLSKRLVENAVLKAVQQYLEETQNKNKPGEGSSVKTEAADQNGNDNENNRK
